(19) United States
(12) Patent Application Publication
(10) Pub. No.: US 2004/0023904 A1
(43) Pub. Date: Feb. 5, 2004

(54) Antisense modulation of PTPRA expression

(75) Inventors: Lex M. Cowsert, San Mateo, CA (US); Susan M. Freier, San Diego, CA (US); Kenneth W. Dobie, Del Mar, CA (US)

Correspondence Address: Jane Massey Licata, Licata & Tyrrell, P.C., 66 East Main Street, Marlton, NJ, 08053, US

(73) Assignee: Isis Pharmaceuticals Inc.

(21) Appl. No.: 10/210,556

(22) Filed: Jul. 31, 2002

(51) Int. Cl. A61K 48/00; C07H 21/04

(52) U.S. Cl. 514/44; 536/23.5

(57) ABSTRACT

Antisense compounds, compositions and methods are provided for modulating the expression of PTPRA. The compositions comprise antisense compounds, particularly antisense oligonucleotides, targeted to nucleic acids encoding PTPRA. Methods of using these compounds for modulation of PTPRA expression and for treatment of diseases associated with expression of PTPRA are provided.

### FIELD OF THE INVENTION

[0001] The present invention provides compositions and methods for modulating the expression of PTPRA. In particular, this invention relates to compounds, particularly oligonucleotides, specifically hybridizable with nucleic acids encoding PTPRA. Such compounds have been shown to modulate the expression of PTPRA.

### BACKGROUND OF THE INVENTION

[0002] The process of phosphorylation, defined as the attachment of a phosphate moiety to a biological molecule through the action of enzymes called kinases, represents one course by which intracellular signals are propagated resulting finally in a cellular response. Within the cell, proteins can be phosphorylated on serine, threonine or tyrosine residues and the extent of phosphorylation is regulated by the opposing action of phosphatases, which remove the phosphate moieties. While the majority of protein phosphorylation within the cell is on serine and threonine residues, tyrosine phosphorylation is modulated to the greatest extent during oncogenic transformation and growth factor stimulation (Zhang, Critical Review in Biochemistry and Molecular Biology, 1998, 33, 1-52).

[0003] Because phosphorylation is such a ubiquitous process within cells and because cellular phenotypes are largely influenced by the activity of these pathways, it is currently believed that a number of disease states and/or disorders are a result of either aberrant activation of, or functional mutations in, kinases and phosphatases. Consequently, considerable attention has been devoted recently to the characterization of tyrosine kinases and tyrosine phosphatases.

[0004] PTPRA (also known as protein tyrosine phosphatase, receptor type alpha, LCA-related phosphatase; LRP, HLPR, HPTPA, PTPRL2 and RPTPA) is a widely expressed member of the family of receptor-like phosphatases. It was cloned from a human hepatoblastoma cell line (Jirik et al., FEBS Lett., 1990, 273, 239-242) and a brain stem cell line (Kaplan et al., Proc. Natl. Acad. Sci. U.S.A., 1990, 87, 7000-7004) and was mapped to chromosome 20p13, a chromosomal region involved in translocations and deletions in myeloid disorders and neoplasms (Jirik et al., Cytogenet. Cell Genet., 1992, 60, 117-118; Kaplan et al., Proc. Natl. Acad. Sci. U.S.A., 1990, 87, 7000-7004).

[0005] Disclosed and claimed in U.S. Pat. No. 5,538,886 and are isolated nucleic acid sequences encoding PTPRA and nucleic acids that hybridize under highly stringent conditions to said nucleic acid sequences (Schlessinger and Sap, 1996).

[0006] Kaplan et al. have presented evidence for the existence of two major PTPRA RNA transcripts of approximately 4.3 and 6.3 kb (Kaplan et al., Proc. Natl. Acad. Sci. U.S.A., 1990, 87, 7000-7004) whose proteins differ in a stretch of 9 amino acid residues situated in the external juxtamembrane segment (Daum et al., J. Biol. Chem., 1994, 269, 10524-10528). The larger of the two species appears to be more prevalent in fetal tissues, suggesting that the differential expression of the two transcripts is developmentally regulated and/or a result of alternative splicing mechanisms (Kaplan et al., Proc. Natl. Acad. Sci. U.S.A., 1990, 87, 7000-7004). Four additional variants have been subsequently identified.

[0007] PTPRA has been implicated in the activation of mitogen-activated protein kinase and c-Jun (Zheng and Pallen, J. Biol. Chem., 1994, 269, 23302-23309) and has been associated with Grb2 which acts as an adaptor between tyrosine-phosphorylated proteins and Sos, a guanine nucleotide exchange protein for Ras (Su et al., J. Biol. Chem., 1996, 271, 28086-28096).

[0008] Overexpression of PTPRA in rat embryo fibroblasts activates the kinase Src and causes neoplastic transformation (Zheng et al., Nature, 1992, 359, 336-339; Zheng et al., Embo J., 2000, 19, 964-978). The role of PTPRA as an activator of the kinases Src and Fyn have been confirmed in investigations of PTPRA deficient mice (Ponniah et al., Curr. Biol., 1999, 9, 535-538; Su et al., Curr. Biol., 1999, 9, 505-511).

[0009] In addition, PTPRA has been found to be overexpressed in oral squamous cell carcinoma (Berndt et al., Histochem. Cell Biol., 1999, 111, 399-403) and late stage colon carcinoma (Tabiti et al., Cancer Lett. (Shannon, Irel.), 1995, 93, 239-248).

[0010] The identification of PTPRA as a negative regulator of insulin receptor signaling indicates that it may play a key role in insulin action and in the pathophysiology of non-insulin-dependent diabetes (Moeller et al., J. Biol. Chem., 1995, 270, 23126-23131).

[0011] The involvement of PTPRA in cell signaling events make it a potentially useful therapeutic target for intervention in hyperproliferative disorders, metabolic disorders and disorders arising from aberrant apoptosis.

[0012] To date, investigative strategies aimed at modulating PTPRA function have involved the use of small molecule inhibitors, hormones and an antisense oligonucelotide. However, these strategies have yet to be tested as therapeutic protocols.

[0013] Zelivianski et al. have demonstrated down-regulation of PTPRA by 5-alpha-dihydrotestosterone in investigations of the expression of PTPRA mRNA in human prostate cancer cells (Zelivianski et al., Mol. Cell. Biochem., 2000, 208, 11-18). Vanadates have been employed as general inhibitors of phosphatases in investigations of PTPRA's interactions with focal adhesion plaques and the protein p130cas (Buist et al., J. Biol. Chem., 2000, 275, 20754-20761; Lammers et al., J. Biol. Chem., 2000, 275, 3391-3396).

[0014] Small molecule inhibitors of tyrosine phosphatases exist in the art. For example, disclosed and claimed in U.S. Pat. No. 6,169,087 are small molecule inhibitors of protein tyrosine phosphatases for the treatment of type I diabetes, type II diabetes, impaired glucose tolerance, insulin resistance, obesity, and a number of other diseases (Andersen et al., 2001).

[0015] A phosphorothioate oligonucleotide targeting the initiation codon of murine PTPRA was used to inhibit PTPRA expression in investigations of its role in regulation of c-Src and insulin receptor signaling (Arnott et al., J. Biol. Chem., 1999, 274, 26105-26112).

[0016] There remains a long felt need for agents capable of effectively inhibiting PTPRA function.

[0017] Antisense technology is emerging as an effective means for reducing the expression of specific gene products and may therefore prove to be uniquely useful in a number of therapeutic, diagnostic, and research applications for the modulation of PTPRA expression.

[0018] The present invention provides compositions and methods for modulating PTPRA expression, including modulation of the expression of alternatively spliced variants of PTPRA.

### SUMMARY OF THE INVENTION

[0019] The present invention is directed to compounds, particularly antisense oligonucleotides, which are targeted to a nucleic acid encoding PTPRA, and which modulate the expression of PTPRA. Pharmaceutical and other compositions comprising the compounds of the invention are also provided. Further provided are methods of modulating the expression of PTPRA in cells or tissues comprising contacting said cells or tissues with one or more of the antisense compounds or compositions of the invention. Further provided are methods of treating an animal, particularly a human, suspected of having or being prone to a disease or condition associated with expression of PTPRA by administering a therapeutically or prophylactically effective amount of one or more of the antisense compounds or compositions of the invention.

### DETAILED DESCRIPTION OF THE INVENTION

[0020] The present invention employs oligomeric compounds, particularly antisense oligonucleotides, for use in modulating the function of nucleic acid molecules encoding PTPRA, ultimately modulating the amount of PTPRA produced. This is accomplished by providing antisense compounds which specifically hybridize with one or more nucleic acids encoding PTPRA. As used herein, the terms “target nucleic acid” and “nucleic acid encoding PTPRA” encompass DNA encoding PTPRA, RNA (including pre-mRNA and mRNA) transcribed from such DNA, and also cDNA derived from such RNA. The specific hybridization of an oligomeric compound with its target nucleic acid interferes with the normal function of the nucleic acid. This modulation of function of a target nucleic acid by compounds which specifically hybridize to it is generally referred to as “antisense”. The functions of DNA to be interfered with include replication and transcription. The functions of RNA to be interfered with include all vital functions such as, for example, translocation of the RNA to the site of protein translation, translocation of the RNA to sites within the cell which are distant from the site of RNA synthesis, translation of protein from the RNA, splicing of the RNA to yield one or more mRNA species, and catalytic activity which may be engaged in or facilitated by the RNA. The overall effect of such interference with target nucleic acid function is modulation of the expression of PTPRA. In the context of the present invention, “modulation” means either an increase (stimulation) or a decrease (inhibition) in the expression of a gene. In the context of the present invention, inhibition is the preferred form of modulation of gene expression and mRNA is a preferred target.

[0021] It is preferred to target specific nucleic acids for antisense. “Targeting” an antisense compound to a particular nucleic acid, in the context of this invention, is a multistep process. The process usually begins with the identification of a nucleic acid sequence whose function is to be modulated. This may be, for example, a cellular gene (or mRNA transcribed from the gene) whose expression is associated with a particular disorder or disease state, or a nucleic acid molecule from an infectious agent. In the present invention, the target is a nucleic acid molecule encoding PTPRA. The targeting process also includes determination of a site or sites within this gene for the antisense interaction to occur such that the desired effect, e.g., detection or modulation of expression of the protein, will result. Within the context of the present invention, a preferred intragenic site is the region encompassing the translation initiation or termination codon of the open reading frame (ORF) of the gene. Since, as is known in the art, the translation initiation codon is typically 5′-AUG (in transcribed mRNA molecules; 5′-ATG in the corresponding DNA molecule), the translation initiation codon is also referred to as the “AUG codon,” the “start codon” or the “AUG start codon”. A minority of genes have a translation initiation codon having the RNA sequence 5′-GUG, 5′-UUG or 5′-CUG, and 5′-AUA, 5′-ACG and 5′-CUG have been shown to function in vivo. Thus, the terms “translation initiation codon” and “start codon” can encompass many codon sequences, even though the initiator amino acid in each instance is typically methionine (in eukaryotes) or formylmethionine (in prokaryotes). It is also known in the art that eukaryotic and prokaryotic genes may have two or more alternative start codons, any one of which may be preferentially utilized for translation initiation in a particular cell type or tissue, or under a particular set of conditions. In the context of the invention, “start codon” and “translation initiation codon” refer to the codon or codons that are used in vivo to initiate translation of an mRNA molecule transcribed from a gene encoding PTPRA, regardless of the sequence(s) of such codons.

[0022] It is also known in the art that a translation termination codon (or “stop codon”) of a gene may have one of three sequences, i.e., 5′-UAA, 5′-UAG and 5′-UGA (the corresponding DNA sequences are 5′-TAA, 5′-TAG and 5′-TGA, respectively). The terms “start codon region” and “translation initiation codon region” refer to a portion of such an mRNA or gene that encompasses from about 25 to about 50 contiguous nucleotides in either direction (i.e., 5′ or 3′) from a translation initiation codon. Similarly, the terms “stop codon region” and “translation termination codon region” refer to a portion of such an mRNA or gene that encompasses from about 25 to about 50 contiguous nucleotides in either direction (i.e., 5′ or 3′) from a translation termination codon.

[0023] The open reading frame (ORF) or “coding region,” which is known in the art to refer to the region between the translation initiation codon and the translation termination codon, is also a region which may be targeted effectively. Other target regions include the 5′ untranslated region (5′UTR), known in the art to refer to the portion of an mRNA in the 5′ direction from the translation initiation codon, and thus including nucleotides between the 5′ cap site and the translation initiation codon of an mRNA or corresponding nucleotides on the gene, and the 3′ untranslated region (3′UTR), known in the art to refer to the portion of an mRNA in the 3′ direction from the translation termination codon, and thus including nucleotides between the translation termination codon and 3′ end of an mRNA or corresponding nucleotides on the gene. The 5′ cap of an mRNA comprises an N7-methylated guanosine residue joined to the 5′-most residue of the mRNA via a 5′-5′ triphosphate linkage. The 5′ cap region of an mRNA is considered to include the 5′ cap structure itself as well as the first 50 nucleotides adjacent to the cap. The 5′ cap region may also be a preferred target region.

[0024] Although some eukaryotic mRNA transcripts are directly translated, many contain one or more regions, known as “introns,” which are excised from a transcript before it is translated. The remaining (and therefore translated) regions are known as “exons” and are spliced together to form a continuous mRNA sequence. mRNA splice sites, i.e., intron-exon junctions, may also be preferred target regions, and are particularly useful in situations where aberrant splicing is implicated in disease, or where an overproduction of a particular mRNA splice product is implicated in disease. Aberrant fusion junctions due to rearrangements or deletions are also preferred targets. mRNA transcripts produced via the process of splicing of two (or more) mRNAs from different gene sources are known as “fusion transcripts”. It has also been found that introns can be effective, and therefore preferred, target regions for antisense compounds targeted, for example, to DNA or pre-mRNA.

[0025] It is also known in the art that alternative RNA transcripts can be produced from the same genomic region of DNA. These alternative transcripts are generally known as “variants”. More specifically, “pre-mRNA variants” are transcripts produced from the same genomic DNA that differ from other transcripts produced from the same genomic DNA in either their start or stop position and contain both intronic and extronic regions.

[0026] Upon excision of one or more exon or intron regions or portions thereof during splicing, pre-mRNA variants produce smaller “mRNA variants”. Consequently, mRNA variants are processed pre-mRNA variants and each unique pre-mRNA variant must always produce a unique mRNA variant as a result of splicing. These mRNA variants are also known as “alternative splice variants”. If no splicing of the pre-mRNA variant occurs then the pre-mRNA variant is identical to the mRNA variant.

[0027] It is also known in the art that variants can be produced through the use of alternative signals to start or stop transcription and that pre-mRNAs and mRNAs can possess more that one start codon or stop codon. Variants that originate from a pre-mRNA or mRNA that use alternative start codons are known as “alternative start variants” of that pre-mRNA or mRNA. Those transcripts that use an alternative stop codon are known as “alternative stop variants” of that pre-mRNA or mRNA. One specific type of alternative stop variant is the “polyA variant” in which the multiple transcripts produced result from the alternative selection of one of the “polyA stop signals” by the transcription machinery, thereby producing transcripts that terminate at unique polyA sites.

[0028] Once one or more target sites have been identified, oligonucleotides are chosen which are sufficiently complementary to the target, i.e., hybridize sufficiently well and with sufficient specificity, to give the desired effect.

[0029] In the context of this invention, “hybridization” means hydrogen bonding, which may be Watson-Crick, Hoogsteen or reversed Hoogsteen hydrogen bonding, between complementary nucleoside or nucleotide bases. For example, adenine and thymine are complementary nucleobases which pair through the formation of hydrogen bonds. “Complementary,” as used herein, refers to the capacity for precise pairing between two nucleotides. For example, if a nucleotide at a certain position of an oligonucleotide is capable of hydrogen bonding with a nucleotide at the same position of a DNA or RNA molecule, then the oligonucleotide and the DNA or RNA are considered to be complementary to each other at that position. The oligonucleotide and the DNA or RNA are complementary to each other when a sufficient number of corresponding positions in each molecule are occupied by nucleotides which can hydrogen bond with each other. Thus, “specifically hybridizable” and “complementary” are terms which are used to indicate a sufficient degree of complementarity or precise pairing such that stable and specific binding occurs between the oligonucleotide and the DNA or RNA target. It is understood in the art that the sequence of an antisense compound need not be 100% complementary to that of its target nucleic acid to be specifically hybridizable.

[0030] An antisense compound is specifically hybridizable when binding of the compound to the target DNA or RNA molecule interferes with the normal function of the target DNA or RNA to cause a loss of activity, and there is a sufficient degree of complementarity to avoid non-specific binding of the antisense compound to non-target sequences under conditions in which specific binding is desired, i.e., under physiological conditions in the case of in vivo assays or therapeutic treatment, and in the case of in vitro assays, under conditions in which the assays are performed. It is preferred that the antisense compounds of the present invention comprise at least 80% sequence complementarity to a target region within the target nucleic acid, moreover that they comprise 90% sequence complementarity and even more comprise 95% sequence complementarity to the target region within the target nucleic acid sequence to which they are targeted. For example, an antisense compound in which 18 of 20 nucleobases of the antisense compound are complementary, and would therefore specifically hybridize, to a target region would represent 90 percent complementarity. Percent complementarity of an antisense compound with a region of a target nucleic acid can be determined routinely using basic local alignment search tools (BLAST programs) (Altschul et al., J. Mol. Biol., 1990, 215, 403-410; Zhang and Madden, Genome Res., 1997, 7, 649-656).

[0031] Antisense and other compounds of the invention, which hybridize to the target and inhibit expression of the target, are identified through experimentation, and representative sequences of these compounds are hereinbelow identified as preferred embodiments of the invention. The sites to which these preferred antisense compounds are specifically hybridizable are hereinbelow referred to as “preferred target regions” and are therefore preferred sites for targeting. As used herein the term “preferred target region” is defined as at least an 8-nucleobase portion of a target region to which an active antisense compound is targeted. While not wishing to be bound by theory, it is presently believed that these target regions represent regions of the target nucleic acid which are accessible for hybridization.

[0032] While the specific sequences of particular preferred target regions are set forth below, one of skill in the art will recognize that these serve to illustrate and describe particular embodiments within the scope of the present invention. Additional preferred target regions may be identified by one having ordinary skill.

[0033] Target regions 8-80 nucleobases in length comprising a stretch of at least eight (8) consecutive nucleobases selected from within the illustrative preferred target regions are considered to be suitable preferred target regions as well.

[0034] Exemplary good preferred target regions include DNA or RNA sequences that comprise at least the 8 consecutive nucleobases from the 5′-terminus of one of the illustrative preferred target regions (the remaining nucleobases being a consecutive stretch of the same DNA or RNA beginning immediately upstream of the 5′-terminus of the target region and continuing until the DNA or RNA contains about 8 to about 80 nucleobases). Similarly good preferred target regions are represented by DNA or RNA sequences that comprise at least the 8 consecutive nucleobases from the 3′-terminus of one of the illustrative preferred target regions (the remaining nucleobases being a consecutive stretch of the same DNA or RNA beginning immediately downstream of the 3′-terminus of the target region and continuing until the DNA or RNA contains about 8 to about 80 nucleobases). One having skill in the art, once armed with the empirically-derived preferred target regions illustrated herein will be able, without undue experimentation, to identify further preferred target regions. In addition, one having ordinary skill in the art will also be able to identify additional compounds, including oligonucleotide probes and primers, that specifically hybridize to these preferred target regions using techniques available to the ordinary practitioner in the art.

[0035] Antisense compounds are commonly used as research reagents and diagnostics. For example, antisense oligonucleotides, which are able to inhibit gene expression with exquisite specificity, are often used by those of ordinary skill to elucidate the function of particular genes. Antisense compounds are also used, for example, to distinguish between functions of various members of a biological pathway. Antisense modulation has, therefore, been harnessed for research use.

[0036] For use in kits and diagnostics, the antisense compounds of the present invention, either alone or in combination with other antisense compounds or therapeutics, can be used as tools in differential and/or combinatorial analyses to elucidate expression patterns of a portion or the entire complement of genes expressed within cells and tissues.

[0037] Expression patterns within cells or tissues treated with one or more antisense compounds are compared to control cells or tissues not treated with antisense compounds and the patterns produced are analyzed for differential levels of gene expression as they pertain, for example, to disease association, signaling pathway, cellular localization, expression level, size, structure or function of the genes examined. These analyses can be performed on stimulated or unstimulated cells and in the presence or absence of other compounds which affect expression patterns.

[0038] Examples of methods of gene expression analysis known in the art include DNA arrays or microarrays (Brazma and Vilo, FEBS Lett., 2000, 480, 17-24; Celis, et al., FEBS Lett., 2000, 480, 2-16), SAGE (serial analysis of gene expression)(Madden, et al., Drug Discov. Today, 2000, 5, 415-425), READS (restriction enzyme amplification of digested cDNAs) (Prashar and Weissman, Methods Enzymol., 1999, 303, 258-72), TOGA (total gene expression analysis) (Sutcliffe, et al., Proc. Natl. Acad. Sci. U.S.A., 2000, 97, 1976-81), protein arrays and proteomics (Celis, et al., FEBS Lett., 2000, 480, 2-16; Jungblut, et al., Electrophoresis, 1999, 20, 2100-10), expressed sequence tag (EST) sequencing (Celis, et al., FEBS Lett., 2000, 480, 2-16; Larsson, et al., J. Biotechnol., 2000, 80, 143-57), subtractive RNA fingerprinting (SuRF) (Fuchs, et al., Anal. Biochem., 2000, 286, 91-98; Larson, et al., Cytometry, 2000, 41, 203-208), subtractive cloning, differential display (DD) (Jurecic and Belmont, Curr. Opin. Microbiol., 2000, 3, 316-21), comparative genomic hybridization (Carulli, et al., J. Cell Biochem. Suppl., 1998, 31, 286-96), FISH (fluorescent in situ hybridization) techniques (Going and Gusterson, Eur. J. Cancer, 1999, 35, 1895-904) and mass spectrometry methods (reviewed in To, Comb. Chem. High Throughput Screen, 2000, 3, 235-41).

[0039] The specificity and sensitivity of antisense is also harnessed by those of skill in the art for therapeutic uses. Antisense oligonucleotides have been employed as therapeutic moieties in the treatment of disease states in animals and man. Antisense oligonucleotide drugs, including ribozymes, have been safely and effectively administered to humans and numerous clinical trials are presently underway. It is thus established that oligonucleotides can be useful therapeutic modalities that can be configured to be useful in treatment regimes for treatment of cells, tissues and animals, especially humans.

[0040] In the context of this invention, the term “oligonucleotide” refers to an oligomer or polymer of ribonucleic acid (RNA) or deoxyribonucleic acid (DNA) or mimetics thereof. This term includes oligonucleotides composed of naturally-occurring nucleobases, sugars and covalent internucleoside (backbone) linkages as well as oligonucleotides having non-naturally-occurring portions which function similarly. Such modified or substituted oligonucleotides are often preferred over native forms because of desirable properties such as, for example, enhanced cellular uptake, enhanced affinity for nucleic acid target and increased stability in the presence of nucleases.

[0041] While antisense oligonucleotides are a preferred form of antisense compound, the present invention comprehends other oligomeric antisense compounds, including but not limited to oligonucleotide mimetics such as are described below. The antisense compounds in accordance with this invention preferably comprise from about 8 to about 80 nucleobases (i.e. from about 8 to about 80 linked nucleosides). Particularly preferred antisense compounds are antisense oligonucleotides from about 8 to about 50 nucleobases, even more preferably those comprising from about 12 to about 30 nucleobases. Antisense compounds include ribozymes, external guide sequence (EGS) oligonucleotides (oligozymes), and other short catalytic RNAs or catalytic oligonucleotides which hybridize to the target nucleic acid and modulate its expression.

[0042] Antisense compounds 8-80 nucleobases in length comprising a stretch of at least eight (8) consecutive nucleobases selected from within the illustrative antisense compounds are considered to be suitable antisense compounds as well.

[0043] Exemplary preferred antisense compounds include DNA or RNA sequences that comprise at least the 8 consecutive nucleobases from the 5′-terminus of one of the illustrative preferred antisense compounds (the remaining nucleobases being a consecutive stretch of the same DNA or RNA beginning immediately upstream of the 5′-terminus of the antisense compound which is specifically hybridizable to the target nucleic acid and continuing until the DNA or RNA contains about 8 to about 80 nucleobases). Similarly preferred antisense compounds are represented by DNA or RNA sequences that comprise at least the 8 consecutive nucleobases from the 3′-terminus of one of the illustrative preferred antisense compounds (the remaining nucleobases being a consecutive stretch of the same DNA or RNA beginning immediately downstream of the 3′-terminus of the antisense compound which is specifically hybridizable to the target nucleic acid and continuing until the DNA or RNA contains about 8 to about 80 nucleobases). One having skill in the art, once armed with the empirically-derived preferred antisense compounds illustrated herein will be able, without undue experimentation, to identify further preferred antisense compounds.

[0044] Antisense and other compounds of the invention, which hybridize to the target and inhibit expression of the target, are identified through experimentation, and representative sequences of these compounds are herein identified as preferred embodiments of the invention. While specific sequences of the antisense compounds are set forth herein, one of skill in the art will recognize that these serve to illustrate and describe particular embodiments within the scope of the present invention. Additional preferred antisense compounds may be identified by one having ordinary skill.

[0045] As is known in the art, a nucleoside is a base-sugar combination. The base portion of the nucleoside is normally a heterocyclic base. The two most common classes of such heterocyclic bases are the purines and the pyrimidines. Nucleotides are nucleosides that further include a phosphate group covalently linked to the sugar portion of the nucleoside. For those nucleosides that include a pentofuranosyl sugar, the phosphate group can be linked to either the 2′, 3′ or 5′ hydroxyl moiety of the sugar. In forming oligonucleotides, the phosphate groups covalently link adjacent nucleosides to one another to form a linear polymeric compound. In turn, the respective ends of this linear polymeric structure can be further joined to form a circular structure, however, open linear structures are generally preferred. In addition, linear structures may also have internal nucleobase complementarity and may therefore fold in a manner as to produce a double stranded structure. Within the oligonucleotide structure, the phosphate groups are commonly referred to as forming the internucleoside backbone of the oligonucleotide. The normal linkage or backbone of RNA and DNA is a 3′ to 5′ phosphodiester linkage.

[0046] Specific examples of preferred antisense compounds useful in this invention include oligonucleotides containing modified backbones or non-natural internucleoside linkages. As defined in this specification, oligonucleotides having modified backbones include those that retain a phosphorus atom in the backbone and those that do not have a phosphorus atom in the backbone. For the purposes of this specification, and as sometimes referenced in the art, modified oligonucleotides that do not have a phosphorus atom in their internucleoside backbone can also be considered to be oligonucleosides.

[0047] Preferred modified oligonucleotide backbones include, for example, phosphorothioates, chiral phosphorothioates, phosphorodithioates, phosphotriesters, aminoalkylphosphotriesters, methyl and other alkyl phosphonates including 3′-alkylene phosphonates, 5′-alkylene phosphonates and chiral phosphonates, phosphinates, phosphoramidates including 3′-amino phosphoramidate and aminoalkylphosphoramidates, thionophosphoramidates, thionoalkylphosphonates, thionoalkylphosphotriesters, selenophosphates and boranophosphates having normal 3′-5′ linkages, 2′-5′ linked analogs of these, and those having inverted polarity wherein one or more internucleotide linkages is a 3′ to 3′, 5′ to 5′ or 2′ to 2′ linkage. Preferred oligonucleotides having inverted polarity comprise a single 3′ to 3′ linkage at the 3′-most internucleotide linkage i.e. a single inverted nucleoside residue which may be abasic (the nucleobase is missing or has a hydroxyl group in place thereof). Various salts, mixed salts and free acid forms are also included.

[0048] Representative United States patents that teach the preparation of the above phosphorus-containing linkages include, but are not limited to, U.S. Pat. Nos. 3,687,808; 4,469,863; 4,476,301; 5,023,243; 5,177,196; 5,188,897; 5,264,423; 5,276,019; 5,278,302; 5,286,717; 5,321,131; 5,399,676; 5,405,939; 5,453,496; 5,455,233; 5,466,677; 5,476,925; 5,519,126; 5,536,821; 5,541,306; 5,550,111; 5,563,253; 5,571,799; 5,587,361; 5,194,599; 5,565,555; 5,527,899; 5,721,218; 5,672,697 and 5,625,050, certain of which are commonly owned with this application, and each of which is herein incorporated by reference.

[0049] Preferred modified oligonucleotide backbones that do not include a phosphorus atom therein have backbones that are formed by short chain alkyl or cycloalkyl internucleoside linkages, mixed heteroatom and alkyl or cycloalkyl internucleoside linkages, or one or more short chain heteroatomic or heterocyclic internucleoside linkages. These include those having morpholino linkages (formed in part from the sugar portion of a nucleoside); siloxane backbones; sulfide, sulfoxide and sulfone backbones; formacetyl and thioformacetyl backbones; methylene formacetyl and thioformacetyl backbones; riboacetyl backbones; alkene containing backbones; sulfamate backbones; methyleneimino and methylenehydrazino backbones; sulfonate and sulfonamide backbones; amide backbones; and others having mixed N, O, S and CH₂ component parts.

[0050] Representative United States patents that teach the preparation of the above oligonucleosides include, but are not limited to, U.S. Pat. Nos. 5,034,506; 5,166,315; 5,185,444; 5,214,134; 5,216,141; 5,235,033; 5,264,562; 5,264,564; 5,405,938; 5,434,257; 5,466,677; 5,470,967; 5,489,677; 5,541,307; 5,561,225; 5,596,086; 5,602,240; 5,610,289; 5,602,240; 5,608,046; 5,610,289; 5,618,704; 5,623,070; 5,663,312; 5,633,360; 5,677,437; 5,792,608; 5,646,269 and 5,677,439, certain of which are commonly owned with this application, and each of which is herein incorporated by reference.

[0051] In other preferred oligonucleotide mimetics, both the sugar and the internucleoside linkage, i.e., the backbone, of the nucleotide units are replaced with novel groups. The base units are maintained for hybridization with an appropriate nucleic acid target compound. One such oligomeric compound, an oligonucleotide mimetic that has been shown to have excellent hybridization properties, is referred to as a peptide nucleic acid (PNA). In PNA compounds, the sugar-backbone of an oligonucleotide is replaced with an amide containing backbone, in particular an aminoethylglycine backbone. The nucleobases are retained and are bound directly or indirectly to aza nitrogen atoms of the amide portion of the backbone. Representative United States patents that teach the preparation of PNA compounds include, but are not limited to, U.S. Pat. Nos. 5,539,082; 5,714,331; and 5,719,262, each of which is herein incorporated by reference. Further teaching of PNA compounds can be found in Nielsen et al., Science, 1991, 254, 1497-1500.

[0052] Most preferred embodiments of the invention are oligonucleotides with phosphorothioate backbones and oligonucleosides with heteroatom backbones, and in particular —CH₂—NH—O—CH₂—, —CH₂—N(CH₃)—O—CH₂— [known as a methylene (methylimino) or MMI backbone], —CH₂—O—N(CH₃)—CH₂—, —CH₂—N(CH₃)—N(CH₃)—CH₂— and —O—N(CH₃)—CH₂—CH₂— [wherein the native phosphodiester backbone is represented as —O—P—O—CH₂—] of the above referenced U.S. Pat. No. 5,489,677, and the amide backbones of the above referenced U.S. Pat. No. 5,602,240. Also preferred are oligonucleotides having morpholino backbone structures of the above-referenced U.S. Pat. No. 5,034,506.

[0053] Modified oligonucleotides may also contain one or more substituted sugar moieties. Preferred oligonucleotides comprise one of the following at the 2′ position: OH; F; O-, S-, or N-alkyl; O-, S-, or N-alkenyl; O-, S- or N-alkynyl; or O-alkyl-O-alkyl, wherein the alkyl, alkenyl and alkynyl may be substituted or unsubstituted C₁ to C₁₀ alkyl or C₂ to C₁₀ alkenyl and alkynyl. Particularly preferred are O[(CH₂)ₙO]ₘCH₃, O(CH₂)ₙOCH₃, O(CH₂)ₙNH₂, O(CH₂)ₙCH₃, O(CH₂)ₙONH₂, and O(CH₂)ₙON[(CH₂)ₙCH₃]₂, where n and m are from 1 to about 10. Other preferred oligonucleotides comprise one of the following at the 2′ position: C₁ to C₁₀ lower alkyl, substituted lower alkyl, alkenyl, alkynyl, alkaryl, aralkyl, O-alkaryl or O-aralkyl, SH, SCH₃, OCN, Cl, Br, CN, CF₃, OCF₃, SOCH₃, SO₂CH₃, ONO₂, NO₂, N₃, NH₂, heterocycloalkyl, heterocycloalkaryl, aminoalkylamino, polyalkylamino, substituted silyl, an RNA cleaving group, a reporter group, an intercalator, a group for improving the pharmacokinetic properties of an oligonucleotide, or a group for improving the pharmacodynamic properties of an oligonucleotide, and other substituents having similar properties. A preferred modification includes 2′-methoxyethoxy (2′-O—CH₂CH₂OCH₃, also known as 2′-O-(2-methoxyethyl) or 2′-MOE) (Martin et al., Helv. Chim. Acta, 1995, 78, 486-504) i.e., an alkoxyalkoxy group. A further preferred modification includes 2′-dimethylaminooxyethoxy, i.e., a O(CH₂)₂ON(CH₃)₂ group, also known as 2′-DMAOE, as described in examples hereinbelow, and 2′-dimethylaminoethoxyethoxy (also known in the art as 2′-O-dimethyl-amino-ethoxy-ethyl or 2′-DMAEOE), i.e., 2′-O—CH₂—O—CH₂—N(CH₃)₂, also described in examples hereinbelow.

[0054] Other preferred modifications include 2′-methoxy (2′-O—CH₃), 2′-aminopropoxy (2′-OCH₂CH₂CH₂NH₂), 2′-allyl (2′-CH₂—CH═CH₂), 2′-O-allyl (2′-O—CH₂—CH═CH₂) and 2′-fluoro (2′-F). The 2′-modification may be in the arabino (up) position or ribo (down) position. A preferred 2′-arabino modification is 2′-F. Similar modifications may also be made at other positions on the oligonucleotide, particularly the 3′ position of the sugar on the 3′ terminal nucleotide or in 2′-5′ linked oligonucleotides and the 5′ position of 5′ terminal nucleotide. Oligonucleotides may also have sugar mimetics such as cyclobutyl moieties in place of the pentofuranosyl sugar. Representative United States patents that teach the preparation of such modified sugar structures include, but are not limited to, U.S. Pat. Nos. 4,981,957; 5,118,800; 5,319,080; 5,359,044; 5,393,878; 5,446,137; 5,466,786; 5,514,785; 5,519,134; 5,567,811; 5,576,427; 5,591,722; 5,597,909; 5,610,300; 5,627,053; 5,639,873; 5,646,265; 5,658,873; 5,670,633; 5,792,747; and 5,700,920, certain of which are commonly owned with the instant application, and each of which is herein incorporated by reference in its entirety.

[0055] A further preferred modification includes Locked Nucleic Acids (LNAs) in which the 2′-hydroxyl group is linked to the 3′ or 4′ carbon atom of the sugar ring thereby forming a bicyclic sugar moiety. The linkage is preferably a methelyne (—CH₂—)ₙ group bridging the 2′ oxygen atom and the 4′ carbon atom wherein n is 1 or 2. LNAs and preparation thereof are described in WO 98/39352 and WO 99/14226.

[0056] Oligonucleotides may also include nucleobase (often referred to in the art simply as “base”) modifications or substitutions. As used herein, “unmodified” or “natural” nucleobases include the purine bases adenine (A) and guanine (G), and the pyrimidine bases thymine (T), cytosine (C) and uracil (U). Modified nucleobases include other synthetic and natural nucleobases such as 5-methylcytosine (5-me-C), 5-hydroxymethyl cytosine, xanthine, hypoxanthine, 2-aminoadenine, 6-methyl and other alkyl derivatives of adenine and guanine, 2-propyl and other alkyl derivatives of adenine and guanine, 2-thiouracil, 2-thiothymine and 2-thiocytosine, 5-halouracil and cytosine, 5-propynyl (—C≡C—CH₃) uracil and cytosine and other alkynyl derivatives of pyrimidine bases, 6-azo uracil, cytosine and thymine, 5-uracil (pseudouracil), 4-thiouracil, 8-halo, 8-amino, 8-thiol, 8-thioalkyl, 8-hydroxyl and other 8-substituted adenines and guanines, 5-halo particularly 5-bromo, 5-trifluoromethyl and other 5-substituted uracils and cytosines, 7-methylguanine and 7-methyladenine, 2-F-adenine, 2-amino-adenine, 8-azaguanine and 8-azaadenine, 7-deazaguanine and 7-deazaadenine and 3-deazaguanine and 3-deazaadenine. Further modified nucleobases include tricyclic pyrimidines such as phenoxazine cytidine(1H-pyrimido[5,4-b][1,4]benzoxazin-2(3H)-one), phenothiazine cytidine (1H-pyrimido[5,4-b][1,4]benzothiazin-2(3H)-one), G-clamps such as a substituted phenoxazine cytidine (e.g. 9-(2-aminoethoxy)-H-pyrimido[5,4-b][1,4]benzoxazin-2(3H)-one), carbazole cytidine (2H-pyrimido[4,5-b]indol-2-one), pyridoindole cytidine (H-pyrido[3′,2′:4,5]pyrrolo[2,3-d]pyrimidin-2-one). Modified nucleobases may also include those in which the purine or pyrimidine base is replaced with other heterocycles, for example 7-deaza-adenine, 7-deazaguanosine, 2-aminopyridine and 2-pyridone. Further nucleobases include those disclosed in U.S. Pat. No. 3,687,808, those disclosed in The Concise Encyclopedia Of Polymer Science And Engineering, pages 858-859, Kroschwitz, J. I., ed. John Wiley & Sons, 1990, those disclosed by Englisch et al., Angewandte Chemie, International Edition, 1991, 30, 613, and those disclosed by Sanghvi, Y. S., Chapter 15, Antisense Research and Applications, pages 289-302, Crooke, S. T. and Lebleu, B., ed., CRC Press, 1993. Certain of these nucleobases are particularly useful for increasing the binding affinity of the oligomeric compounds of the invention. These include 5-substituted pyrimidines, 6-azapyrimidines and N-2, N-6 and O-6 substituted purines, including 2-aminopropyladenine, 5-propynyluracil and 5-propynylcytosine. 5-methylcytosine substitutions have been shown to increase nucleic acid duplex stability by 0.6-1.2° C. (Sanghvi, Y. S., Crooke, S. T. and Lebleu, B., eds., Antisense Research and Applications, CRC Press, Boca Raton, 1993, pp. 276-278) and are presently preferred base substitutions, even more particularly when combined with 2′-O-methoxyethyl sugar modifications.

[0057] Representative United States patents that teach the preparation of certain of the above noted modified nucleobases as well as other modified nucleobases include, but are not limited to, the above noted U.S. Pat. No. 3,687,808, as well as U.S. Pat. Nos. 4,845,205; 5,130,302; 5,134,066; 5,175,273; 5,367,066; 5,432,272; 5,457,187; 5,459,255; 5,484,908; 5,502,177; 5,525,711; 5,552,540; 5,587,469; 5,594,121, 5,596,091; 5,614,617; 5,645,985; 5,830,653; 5,763,588; 6,005,096; and 5,681,941, certain of which are commonly owned with the instant application, and each of which is herein incorporated by reference, and U.S. Pat. No. 5,750,692, which is commonly owned with the instant application and also herein incorporated by reference.

[0058] Another modification of the oligonucleotides of the invention involves chemically linking to the oligonucleotide one or more moieties or conjugates which enhance the activity, cellular distribution or cellular uptake of the oligonucleotide. The compounds of the invention can include conjugate groups covalently bound to functional groups such as primary or secondary hydroxyl groups. Conjugate groups of the invention include intercalators, reporter molecules, polyamines, polyamides, polyethylene glycols, polyethers, groups that enhance the pharmacodynamic properties of oligomers, and groups that enhance the pharmacokinetic properties of oligomers. Typical conjugate groups include cholesterols, lipids, phospholipids, biotin, phenazine, folate, phenanthridine, anthraquinone, acridine, fluoresceins, rhodamines, coumarins, and dyes. Groups that enhance the pharmacodynamic properties, in the context of this invention, include groups that improve oligomer uptake, enhance oligomer resistance to degradation, and/or strengthen sequence-specific hybridization with RNA. Groups that enhance the pharmacokinetic properties, in the context of this invention, include groups that improve oligomer uptake, distribution, metabolism or excretion. Representative conjugate groups are disclosed in International Patent Application PCT/US92/09196, filed Oct. 23, 1992 the entire disclosure of which is incorporated herein by reference. Conjugate moieties include but are not limited to lipid moieties such as a cholesterol moiety (Letsinger et al., Proc. Natl. Acad. Sci. USA, 1989, 86, 6553-6556), cholic acid (Manoharan et al., Bioorg. Med. Chem. Let., 1994, 4, 1053-1060), a thioether, e.g., hexyl-S-tritylthiol (Manoharan et al., Ann. N.Y. Acad. Sci., 1992, 660, 306-309; Manoharan et al., Bioorg. Med. Chem. Let., 1993, 3, 2765-2770), a thiocholesterol (Oberhauser et al., Nucl. Acids Res., 1992, 20, 533-538), an aliphatic chain, e.g., dodecandiol or undecyl residues (Saison-Behmoaras et al., EMBO J., 1991, 10, 1111-1118; Kabanov et al., FEBS Lett., 1990, 259, 327-330; Svinarchuk et al., Biochimie, 1993, 75, 49-54), a phospholipid, e.g., di-hexadecyl-rac-glycerol or triethylammonium 1,2-di-O-hexadecyl-rac-glycero-3-H-phosphonate (Manoharan et al., Tetrahedron Lett., 1995, 36, 3651-3654; Shea et al., Nucl. Acids Res., 1990, 18, 3777-3783), a polyamine or a polyethylene glycol chain (Manoharan et al., Nucleosides & Nucleotides, 1995, 14, 969-973), or adamantane acetic acid (Manoharan et al., Tetrahedron Lett., 1995, 36, 3651-3654), a palmityl moiety (Mishra et al., Biochim. Biophys. Acta, 1995, 1264, 229-237), or an octadecylamine or hexylamino-carbonyl-oxycholesterol moiety (Crooke et al., J. Pharmacol. Exp. Ther., 1996, 277, 923-937). Oligonucleotides of the invention may also be conjugated to active drug substances, for example, aspirin, warfarin, phenylbutazone, ibuprofen, suprofen, fenbufen, ketoprofen, (S)-(+)-pranoprofen, carprofen, dansylsarcosine, 2,3,5-triiodobenzoic acid, flufenamic acid, folinic acid, a benzothiadiazide, chlorothiazide, a diazepine, indomethicin, a barbiturate, a cephalosporin, a sulfa drug, an antidiabetic, an antibacterial or an antibiotic. Oligonucleotide-drug conjugates and their preparation are described in U.S. patent application Ser. No. 09/334,130 (filed Jun. 15, 1999) which is incorporated herein by reference in its entirety.

[0059] Representative United States patents that teach the preparation of such oligonucleotide conjugates include, but are not limited to, U.S. Pat. Nos. 4,828,979; 4,948,882; 5,218,105; 5,525,465; 5,541,313; 5,545,730; 5,552,538; 5,578,717, 5,580,731; 5,580,731; 5,591,584; 5,109,124; 5,118,802; 5,138,045; 5,414,077; 5,486,603; 5,512,439; 5,578,718; 5,608,046; 4,587,044; 4,605,735; 4,667,025; 4,762,779; 4,789,737; 4,824,941; 4,835,263; 4,876,335; 4,904,582; 4,958,013; 5,082,830; 5,112,963; 5,214,136; 5,082,830; 5,112,963; 5,214,136; 5,245,022; 5,254,469; 5,258,506; 5,262,536; 5,272,250; 5,292,873; 5,317,098; 5,371,241, 5,391,723; 5,416,203, 5,451,463; 5,510,475; 5,512,667; 5,514,785; 5,565,552; 5,567,810; 5,574,142; 5,585,481; 5,587,371; 5,595,726; 5,597,696; 5,599,923; 5,599,928 and 5,688,941, certain of which are commonly owned with the instant application, and each of which is herein incorporated by reference.

[0060] It is not necessary for all positions in a given compound to be uniformly modified, and in fact more than one of the aforementioned modifications may be incorporated in a single compound or even at a single nucleoside within an oligonucleotide. The present invention also includes antisense compounds which are chimeric compounds. “Chimeric” antisense compounds or “chimeras,” in the context of this invention, are antisense compounds, particularly oligonucleotides, which contain two or more chemically distinct regions, each made up of at least one monomer unit, i.e., a nucleotide in the case of an oligonucleotide compound. These oligonucleotides typically contain at least one region wherein the oligonucleotide is modified so as to confer upon the oligonucleotide increased resistance to nuclease degradation, increased cellular uptake, increased stability and/or increased binding affinity for the target nucleic acid. An additional region of the oligonucleotide may serve as a substrate for enzymes capable of cleaving RNA:DNA or RNA:RNA hybrids. By way of example, RNAse H is a cellular endonuclease which cleaves the RNA strand of an RNA:DNA duplex. Activation of RNase H, therefore, results in cleavage of the RNA target, thereby greatly enhancing the efficiency of oligonucleotide inhibition of gene expression. The cleavage of RNA:RNA hybrids can, in like fashion, be accomplished through the actions of endoribonucleases, such as interferon-induced RNAseL which cleaves both cellular and viral RNA. Consequently, comparable results can often be obtained with shorter oligonucleotides when chimeric oligonucleotides are used, compared to phosphorothioate deoxyoligonucleotides hybridizing to the same target region. Cleavage of the RNA target can be routinely detected by gel electrophoresis and, if necessary, associated nucleic acid hybridization techniques known in the art.

[0061] Chimeric antisense compounds of the invention may be formed as composite structures of two or more oligonucleotides, modified oligonucleotides, oligonucleosides and/or oligonucleotide mimetics as described above. Such compounds have also been referred to in the art as hybrids or gapmers. Representative United States patents that teach the preparation of such hybrid structures include, but are not limited to, U.S. Pat. Nos. 5,013,830; 5,149,797; 5,220,007; 5,256,775; 5,366,878; 5,403,711; 5,491,133; 5,565,350; 5,623,065; 5,652,355; 5,652,356; and 5,700,922, certain of which are commonly owned with the instant application, and each of which is herein incorporated by reference in its entirety.

[0062] The antisense compounds used in accordance with this invention may be conveniently and routinely made through the well-known technique of solid phase synthesis. Equipment for such synthesis is sold by several vendors including, for example, Applied Biosystems (Foster City, Calif.). Any other means for such synthesis known in the art may additionally or alternatively be employed. It is well known to use similar techniques to prepare oligonucleotides such as the phosphorothioates and alkylated derivatives.

[0063] The compounds of the invention may also be admixed, encapsulated, conjugated or otherwise associated with other molecules, molecule structures or mixtures of compounds, as for example, liposomes, receptor-targeted molecules, oral, rectal, topical or other formulations, for assisting in uptake, distribution and/or absorption. Representative United States patents that teach the preparation of such uptake, distribution and/or absorption-assisting formulations include, but are not limited to, U.S. Pat. Nos. 5,108,921; 5,354,844; 5,416,016; 5,459,127; 5,521,291; 5,543,158; 5,547,932; 5,583,020; 5,591,721; 4,426,330; 4,534,899; 5,013,556; 5,108,921; 5,213,804; 5,227,170; 5,264,221; 5,356,633; 5,395,619; 5,416,016; 5,417,978; 5,462,854; 5,469,854; 5,512,295; 5,527,528; 5,534,259; 5,543,152; 5,556,948; 5,580,575; and 5,595,756, each of which is herein incorporated by reference.

[0064] The antisense compounds of the invention encompass any pharmaceutically acceptable salts, esters, or salts of such esters, or any other compound which, upon administration to an animal, including a human, is capable of providing (directly or indirectly) the biologically active metabolite or residue thereof. Accordingly, for example, the disclosure is also drawn to prodrugs and pharmaceutically acceptable salts of the compounds of the invention, pharmaceutically acceptable salts of such prodrugs, and other bioequivalents.

[0065] The term “prodrug” indicates a therapeutic agent that is prepared in an inactive form that is converted to an active form (i.e., drug) within the body or cells thereof by the action of endogenous enzymes or other chemicals and/or conditions. In particular, prodrug versions of the oligonucleotides of the invention are prepared as SATE [(S-acetyl-2-thioethyl) phosphate] derivatives according to the methods disclosed in WO 93/24510 to Gosselin et al., published Dec. 9, 1993 or in WO 94/26764 and U.S. Pat. No. 5,770,713 to Imbach et al.

[0066] The term “pharmaceutically acceptable salts” refers to physiologically and pharmaceutically acceptable salts of the compounds of the invention: i.e., salts that retain the desired biological activity of the parent compound and do not impart undesired toxicological effects thereto.

[0067] Pharmaceutically acceptable base addition salts are formed with metals or amines, such as alkali and alkaline earth metals or organic amines. Examples of metals used as cations are sodium, potassium, magnesium, calcium, and the like. Examples of suitable amines are N,N′-dibenzylethylenediamine, chloroprocaine, choline, diethanolamine, dicyclohexylamine, ethylenediamine, N-methylglucamine, and procaine (see, for example, Berge et al., “Pharmaceutical Salts,” J. of Pharma Sci., 1977, 66, 1-19). The base addition salts of said acidic compounds are prepared by contacting the free acid form with a sufficient amount of the desired base to produce the salt in the conventional manner. The free acid form may be regenerated by contacting the salt form with an acid and isolating the free acid in the conventional manner. The free acid forms differ from their respective salt forms somewhat in certain physical properties such as solubility in polar solvents, but otherwise the salts are equivalent to their respective free acid for purposes of the present invention. As used herein, a “pharmaceutical addition salt” includes a pharmaceutically acceptable salt of an acid form of one of the components of the compositions of the invention. These include organic or inorganic acid salts of the amines. Preferred acid salts are the hydrochlorides, acetates, salicylates, nitrates and phosphates. Other suitable pharmaceutically acceptable salts are well known to those skilled in the art and include basic salts of a variety of inorganic and organic acids, such as, for example, with inorganic acids, such as for example hydrochloric acid, hydrobromic acid, sulfuric acid or phosphoric acid; with organic carboxylic, sulfonic, sulfo or phospho acids or N-substituted sulfamic acids, for example acetic acid, propionic acid, glycolic acid, succinic acid, maleic acid, hydroxymaleic acid, methylmaleic acid, fumaric acid, malic acid, tartaric acid, lactic acid, oxalic acid, gluconic acid, glucaric acid, glucuronic acid, citric acid, benzoic acid, cinnamic acid, mandelic acid, salicylic acid, 4-aminosalicylic acid, 2-phenoxybenzoic acid, 2-acetoxybenzoic acid, embonic acid, nicotinic acid or isonicotinic acid; and with amino acids, such as the 20 alpha-amino acids involved in the synthesis of proteins in nature, for example glutamic acid or aspartic acid, and also with phenylacetic acid, methanesulfonic acid, ethanesulfonic acid, 2-hydroxyethanesulfonic acid, ethane-1,2-disulfonic acid, benzenesulfonic acid, 4-methylbenzenesulfonic acid, naphthalene-2-sulfonic acid, naphthalene-1,5-disulfonic acid, 2- or 3-phosphoglycerate, glucose-6-phosphate, N-cyclohexylsulfamic acid (with the formation of cyclamates), or with other acid organic compounds, such as ascorbic acid. Pharmaceutically acceptable salts of compounds may also be prepared with a pharmaceutically acceptable cation. Suitable pharmaceutically acceptable cations are well known to those skilled in the art and include alkaline, alkaline earth, ammonium and quaternary ammonium cations. Carbonates or hydrogen carbonates are also possible.

[0068] For oligonucleotides, preferred examples of pharmaceutically acceptable salts include but are not limited to (a) salts formed with cations such as sodium, potassium, ammonium, magnesium, calcium, polyamines such as spermine and spermidine, etc.; (b) acid addition salts formed with inorganic acids, for example hydrochloric acid, hydrobromic acid, sulfuric acid, phosphoric acid, nitric acid and the like; (c) salts formed with organic acids such as, for example, acetic acid, oxalic acid, tartaric acid, succinic acid, maleic acid, fumaric acid, gluconic acid, citric acid, malic acid, ascorbic acid, benzoic acid, tannic acid, palmitic acid, alginic acid, polyglutamic acid, naphthalenesulfonic acid, methanesulfonic acid, p-toluenesulfonic acid, naphthalenedisulfonic acid, polygalacturonic acid, and the like; and (d) salts formed from elemental anions such as chlorine, bromine, and iodine.

[0069] The antisense compounds of the present invention can be utilized for diagnostics, therapeutics, prophylaxis and as research reagents and kits. For therapeutics, an animal, preferably a human, suspected of having a disease or disorder which can be treated by modulating the expression of PTPRA is treated by administering antisense compounds in accordance with this invention. The compounds of the invention can be utilized in pharmaceutical compositions by adding an effective amount of an antisense compound to a suitable pharmaceutically acceptable diluent or carrier. Use of the antisense compounds and methods of the invention may also be useful prophylactically, e.g., to prevent or delay infection, inflammation or tumor formation, for example.

[0070] The antisense compounds of the invention are useful for research and diagnostics, because these compounds hybridize to nucleic acids encoding PTPRA, enabling sandwich and other assays to easily be constructed to exploit this fact. Hybridization of the antisense oligonucleotides of the invention with a nucleic acid encoding PTPRA can be detected by means known in the art. Such means may include conjugation of an enzyme to the oligonucleotide, radiolabelling of the oligonucleotide or any other suitable detection means. Kits using such detection means for detecting the level of PTPRA in a sample may also be prepared.

[0071] The present invention also includes pharmaceutical compositions and formulations which include the antisense compounds of the invention. The pharmaceutical compositions of the present invention may be administered in a number of ways depending upon whether local or systemic treatment is desired and upon the area to be treated. Administration may be topical (including ophthalmic and to mucous membranes including vaginal and rectal delivery), pulmonary, e.g., by inhalation or insufflation of powders or aerosols, including by nebulizer; intratracheal, intranasal, epidermal and transdermal), oral or parenteral. Parenteral administration includes intravenous, intraarterial, subcutaneous, intraperitoneal or intramuscular injection or infusion; or intracranial, e.g., intrathecal or intraventricular, administration. Oligonucleotides with at least one 2′-o-methoxyethyl modification are believed to be particularly useful for oral administration.

[0072] Pharmaceutical compositions and formulations for topical administration may include transdermal patches, ointments, lotions, creams, gels, drops, suppositories, sprays, liquids and powders. Conventional pharmaceutical carriers, aqueous, powder or oily bases, thickeners and the like may be necessary or desirable. Coated condoms, gloves and the like may also be useful. Preferred topical formulations include those in which the oligonucleotides of the invention are in admixture with a topical delivery agent such as lipids, liposomes, fatty acids, fatty acid esters, steroids, chelating agents and surfactants. Preferred lipids and liposomes include neutral (e.g. dioleoylphosphatidyl DOPE ethanolamine, dimyristoylphosphatidyl choline DMPC, distearolyphosphatidyl choline) negative (e.g. dimyristoylphosphatidyl glycerol DMPG) and cationic (e.g. dioleoyltetramethylaminopropyl DOTAP and dioleoylphosphatidyl ethanolamine DOTMA). Oligonucleotides of the invention may be encapsulated within liposomes or may form complexes thereto, in particular to cationic liposomes. Alternatively, oligonucleotides may be complexed to lipids, in particular to cationic lipids. Preferred fatty acids and esters include but are not limited arachidonic acid, oleic acid, eicosanoic acid, lauric acid, caprylic acid, capric acid, myristic acid, palmitic acid, stearic acid, linoleic acid, linolenic acid, dicaprate, tricaprate, monoolein, dilaurin, glyceryl 1-monocaprate, 1-dodecylazacycloheptan-2-one, an acylcarnitine, an acylcholine, or a C₁₋₁₀ alkyl ester (e.g. isopropylmyristate IPM), monoglyceride, diglyceride or pharmaceutically acceptable salt thereof. Topical formulations are described in detail in U.S. patent application Ser. No. 09/315,298 filed on May 20, 1999 which is incorporated herein by reference in its entirety.

[0073] Compositions and formulations for oral administration include powders or granules, microparticulates, nanoparticulates, suspensions or solutions in water or non-aqueous media, capsules, gel capsules, sachets, tablets or minitablets. Thickeners, flavoring agents, diluents, emulsifiers, dispersing aids or binders may be desirable. Preferred oral formulations are those in which oligonucleotides of the invention are administered in conjunction with one or more penetration enhancers surfactants and chelators. Preferred surfactants include fatty acids and/or esters or salts thereof, bile acids and/or salts thereof. Preferred bile acids/salts include chenodeoxycholic acid (CDCA) and ursodeoxychenodeoxycholic acid (UDCA), cholic acid, dehydrocholic acid, deoxycholic acid, glucholic acid, glycholic acid, glycodeoxycholic acid, taurocholic acid, taurodeoxycholic acid, sodium tauro-24,25-dihydro-fusidate and sodium glycodihydrofusidate. Preferred fatty acids include arachidonic acid, undecanoic acid, oleic acid, lauric acid, caprylic acid, capric acid, myristic acid, palmitic acid, stearic acid, linoleic acid, linolenic acid, dicaprate, tricaprate, monoolein, dilaurin, glyceryl 1-monocaprate, 1-dodecylazacycloheptan-2-one, an acylcarnitine, an acylcholine, or a monoglyceride, a diglyceride or a pharmaceutically acceptable salt thereof (e.g. sodium). Also preferred are combinations of penetration enhancers, for example, fatty acids/salts in combination with bile acids/salts. A particularly preferred combination is the sodium salt of lauric acid, capric acid and UDCA. Further penetration enhancers include polyoxyethylene-9-lauryl ether, polyoxyethylene-20-cetyl ether. Oligonucleotides of the invention may be delivered orally, in granular form including sprayed dried particles, or complexed to form micro or nanoparticles. Oligonucleotide complexing agents include poly-amino acids; polyimines; polyacrylates; polyalkylacrylates, polyoxethanes, polyalkylcyanoacrylates; cationized gelatins, albumins, starches, acrylates, polyethyleneglycols (PEG) and starches; polyalkylcyanoacrylates; DEAE-derivatized polyimines, pollulans, celluloses and starches. Particularly preferred complexing agents include chitosan, N-trimethylchitosan, poly-L-lysine, polyhistidine, polyornithine, polyspermines, protamine, polyvinylpyridine, polythiodiethylaminomethylethylene P(TDAE), polyaminostyrene (e.g. p-amino), poly(methylcyanoacrylate), poly(ethylcyanoacrylate), poly(butylcyanoacrylate), poly(isobutylcyanoacrylate), poly(isohexylcynaoacrylate), DEAE-methacrylate, DEAE-hexylacrylate, DEAE-acrylamide, DEAE-albumin and DEAE-dextran, polymethylacrylate, polyhexylacrylate, poly(D,L-lactic acid), poly(DL-lactic-co-glycolic acid (PLGA), alginate, and polyethyleneglycol (PEG). Oral formulations for oligonucleotides and their preparation are described in detail in U.S. application Ser. No. 08/886,829 (filed Jul. 1, 1997), Ser. No. 09/108,673 (filed Jul. 1, 1998), Ser. No. 09/256,515 (filed Feb. 23, 1999), Ser. No. 09/082,624 (filed May 21, 1998) and Ser. No. 09/315,298 (filed May 20, 1999), each of which is incorporated herein by reference in their entirety.

[0074] Compositions and formulations for parenteral, intrathecal or intraventricular administration may include sterile aqueous solutions which may also contain buffers, diluents and other suitable additives such as, but not limited to, penetration enhancers, carrier compounds and other pharmaceutically acceptable carriers or excipients.

[0075] Pharmaceutical compositions of the present invention include, but are not limited to, solutions, emulsions, and liposome-containing formulations. These compositions may be generated from a variety of components that include, but are not limited to, preformed liquids, self-emulsifying solids and self-emulsifying semisolids.

[0076] The pharmaceutical formulations of the present invention, which may conveniently be presented in unit dosage form, may be prepared according to conventional techniques well known in the pharmaceutical industry. Such techniques include the step of bringing into association the active ingredients with the pharmaceutical carrier(s) or excipient(s). In general, the formulations are prepared by uniformly and intimately bringing into association the active ingredients with liquid carriers or finely divided solid carriers or both, and then, if necessary, shaping the product.

[0077] The compositions of the present invention may be formulated into any of many possible dosage forms such as, but not limited to, tablets, capsules, gel capsules, liquid syrups, soft gels, suppositories, and enemas. The compositions of the present invention may also be formulated as suspensions in aqueous, non-aqueous or mixed media. Aqueous suspensions may further contain substances which increase the viscosity of the suspension including, for example, sodium carboxymethylcellulose, sorbitol and/or dextran. The suspension may also contain stabilizers.

[0078] In one embodiment of the present invention the pharmaceutical compositions may be formulated and used as foams. Pharmaceutical foams include formulations such as, but not limited to, emulsions, microemulsions, creams, jellies and liposomes. While basically similar in nature these formulations vary in the components and the consistency of the final product. The preparation of such compositions and formulations is generally known to those skilled in the pharmaceutical and formulation arts and may be applied to the formulation of the compositions of the present invention.

[0079] Emulsions

[0080] The compositions of the present invention may be prepared and formulated as emulsions. Emulsions are typically heterogenous systems of one liquid dispersed in another in the form of droplets usually exceeding 0.1 μm in diameter (Idson, in Pharmaceutical Dosage Forms, Lieberman, Rieger and Banker (Eds.), 1988, Marcel Dekker, Inc., New York, N.Y., volume 1, p. 199; Rosoff, in Pharmaceutical Dosage Forms, Lieberman, Rieger and Banker (Eds.), 1988, Marcel Dekker, Inc., New York, N.Y., Volume 1, p. 245; Block in Pharmaceutical Dosage Forms, Lieberman, Rieger and Banker (Eds.), 1988, Marcel Dekker, Inc., New York, N.Y., volume 2, p. 335; Higuchi et al., in Remington's Pharmaceutical Sciences, Mack Publishing Co., Easton, Pa., 1985, p. 301). Emulsions are often biphasic systems comprising two immiscible liquid phases intimately mixed and dispersed with each other. In general, emulsions may be of either the water-in-oil (w/o) or the oil-in-water (o/w) variety. When an aqueous phase is finely divided into and dispersed as minute droplets into a bulk oily phase, the resulting composition is called a water-in-oil (w/o) emulsion. Alternatively, when an oily phase is finely divided into and dispersed as minute droplets into a bulk aqueous phase, the resulting composition is called an oil-in-water (o/w) emulsion. Emulsions may contain additional components in addition to the dispersed phases, and the active drug which may be present as a solution in either the aqueous phase, oily phase or itself as a separate phase. Pharmaceutical excipients such as emulsifiers, stabilizers, dyes, and anti-oxidants may also be present in emulsions as needed. Pharmaceutical emulsions may also be multiple emulsions that are comprised of more than two phases such as, for example, in the case of oil-in-water-in-oil (o/w/o) and water-in-oil-in-water (w/o/w) emulsions. Such complex formulations often provide certain advantages that simple binary emulsions do not. Multiple emulsions in which individual oil droplets of an o/w emulsion enclose small water droplets constitute a w/o/w emulsion. Likewise a system of oil droplets enclosed in globules of water stabilized in an oily continuous phase provides an o/w/o emulsion.

[0081] Emulsions are characterized by little or no thermodynamic stability. Often, the dispersed or discontinuous phase of the emulsion is well dispersed into the external or continuous phase and maintained in this form through the means of emulsifiers or the viscosity of the formulation. Either of the phases of the emulsion may be a semisolid or a solid, as is the case of emulsion-style ointment bases and creams. Other means of stabilizing emulsions entail the use of emulsifiers that may be incorporated into either phase of the emulsion. Emulsifiers may broadly be classified into four categories: synthetic surfactants, naturally occurring emulsifiers, absorption bases, and finely dispersed solids (Idson, in Pharmaceutical Dosage Forms, Lieberman, Rieger and Banker (Eds.), 1988, Marcel Dekker, Inc., New York, N.Y., volume 1, p. 199).

[0082] Synthetic surfactants, also known as surface active agents, have found wide applicability in the formulation of emulsions and have been reviewed in the literature (Rieger, in Pharmaceutical Dosage Forms, Lieberman, Rieger and Banker (Eds.), 1988, Marcel Dekker, Inc., New York, N.Y., volume 1, p. 285; Idson, in Pharmaceutical Dosage Forms, Lieberman, Rieger and Banker (Eds.), Marcel Dekker, Inc., New York, N.Y., 1988, volume 1, p. 199). Surfactants are typically amphiphilic and comprise a hydrophilic and a hydrophobic portion. The ratio of the hydrophilic to the hydrophobic nature of the surfactant has been termed the hydrophile/lipophile balance (HLB) and is a valuable tool in categorizing and selecting surfactants in the preparation of formulations. Surfactants may be classified into different classes based on the nature of the hydrophilic group: nonionic, anionic, cationic and amphoteric (Rieger, in Pharmaceutical Dosage Forms, Lieberman, Rieger and Banker (Eds.), 1988, Marcel Dekker, Inc., New York, N.Y., volume 1, p. 285).

[0083] Naturally occurring emulsifiers used in emulsion formulations include lanolin, beeswax, phosphatides, lecithin and acacia. Absorption bases possess hydrophilic properties such that they can soak up water to form w/o emulsions yet retain their semisolid consistencies, such as anhydrous lanolin and hydrophilic petrolatum. Finely divided solids have also been used as good emulsifiers especially in combination with surfactants and in viscous preparations. These include polar inorganic solids, such as heavy metal hydroxides, nonswelling clays such as bentonite, attapulgite, hectorite, kaolin, montmorillonite, colloidal aluminum silicate and colloidal magnesium aluminum silicate, pigments and nonpolar solids such as carbon or glyceryl tristearate.

[0084] A large variety of non-emulsifying materials are also included in emulsion formulations and contribute to the properties of emulsions. These include fats, oils, waxes, fatty acids, fatty alcohols, fatty esters, humectants, hydrophilic colloids, preservatives and antioxidants (Block, in Pharmaceutical Dosage Forms, Lieberman, Rieger and Banker (Eds.), 1988, Marcel Dekker, Inc., New York, N.Y., volume 1, p. 335; Idson, in Pharmaceutical Dosage Forms, Lieberman, Rieger and Banker (Eds.), 1988, Marcel Dekker, Inc., New York; N.Y., volume 1, p. 199).

[0085] Hydrophilic colloids or hydrocolloids include naturally occurring gums and synthetic polymers such as polysaccharides (for example, acacia, agar, alginic acid, carrageenan, guar gum, karaya gum, and tragacanth), cellulose derivatives (for example, carboxymethylcellulose and carboxypropylcellulose), and synthetic polymers (for example, carbomers, cellulose ethers, and carboxyvinyl polymers). These disperse or swell in water to form colloidal solutions that stabilize emulsions by forming strong interfacial films around the dispersed-phase droplets and by increasing the viscosity of the external phase.

[0086] Since emulsions often contain a number of ingredients such as carbohydrates, proteins, sterols and phosphatides that may readily support the growth of microbes, these formulations often incorporate preservatives. Commonly used preservatives included in emulsion formulations include methyl paraben, propyl paraben, quaternary ammonium salts, benzalkonium chloride, esters of p-hydroxybenzoic acid, and boric acid. Antioxidants are also commonly added to emulsion formulations to prevent deterioration of the formulation. Antioxidants used may be free radical scavengers such as tocopherols, alkyl gallates, butylated hydroxyanisole, butylated hydroxytoluene, or reducing agents such as ascorbic acid and sodium metabisulfite, and antioxidant synergists such as citric acid, tartaric acid, and lecithin.

[0087] The application of emulsion formulations via dermatological, oral and parenteral routes and methods for their manufacture have been reviewed in the literature (Idson, in Pharmaceutical Dosage Forms, Lieberman, Rieger and Banker (Eds.), 1988, Marcel Dekker, Inc., New York, N.Y., volume 1, p. 199). Emulsion formulations for oral delivery have been very widely used because of ease of formulation, as well as efficacy from an absorption and bioavailability standpoint (Rosoff, in Pharmaceutical Dosage Forms, Lieberman, Rieger and Banker (Eds.), 1988, Marcel Dekker, Inc., New York, N.Y., volume 1, p. 245; Idson, in Pharmaceutical Dosage Forms, Lieberman, Rieger and Banker (Eds.), 1988, Marcel Dekker, Inc., New York, N.Y., volume 1, p. 199). Mineral-oil base laxatives, oil-soluble vitamins and high fat nutritive preparations are among the materials that have commonly been administered orally as o/w emulsions.

[0088] In one embodiment of the present invention, the compositions of oligonucleotides and nucleic acids are formulated as microemulsions. A microemulsion may be defined as a system of water, oil and amphiphile which is a single optically isotropic and thermodynamically stable liquid solution (Rosoff, in Pharmaceutical Dosage Forms, Lieberman, Rieger and Banker (Eds.), 1988, Marcel Dekker, Inc., New York, N.Y., volume 1, p. 245). Typically microemulsions are systems that are prepared by first dispersing an oil in an aqueous surfactant solution and then adding a sufficient amount of a fourth component, generally an intermediate chain-length alcohol to form a transparent system. Therefore, microemulsions have also been described as thermodynamically stable, isotropically clear dispersions of two immiscible liquids that are stabilized by interfacial films of surface-active molecules (Leung and Shah, in: Controlled Release of Drugs: Polymers and Aggregate Systems, Rosoff, M., Ed., 1989, VCH Publishers, New York, pages 185-215). Microemulsions commonly are prepared via a combination of three to five components that include oil, water, surfactant, cosurfactant and electrolyte. Whether the microemulsion is of the water-in-oil (w/o) or an oil-in-water (o/w) type is dependent on the properties of the oil and surfactant used and on the structure and geometric packing of the polar heads and hydrocarbon tails of the surfactant molecules (Schott, in Remington's Pharmaceutical Sciences, Mack Publishing Co., Easton, Pa., 1985, p. 271).

[0089] The phenomenological approach utilizing phase diagrams has been extensively studied and has yielded a comprehensive knowledge, to one skilled in the art, of how to formulate microemulsions (Rosoff, in Pharmaceutical Dosage Forms, Lieberman, Rieger and Banker (Eds.), 1988, Marcel Dekker, Inc., New York, N.Y., volume 1, p. 245; Block, in Pharmaceutical Dosage Forms, Lieberman, Rieger and Banker (Eds.), 1988, Marcel Dekker, Inc., New York, N.Y., volume 1, p. 335). Compared to conventional emulsions, microemulsions offer the advantage of solubilizing water-insoluble drugs in a formulation of thermodynamically stable droplets that are formed spontaneously.

[0090] Surfactants used in the preparation of microemulsions include, but are not limited to, ionic surfactants, non-ionic surfactants, Brij 96, polyoxyethylene oleyl ethers, polyglycerol fatty acid esters, tetraglycerol monolaurate (ML310), tetraglycerol monooleate (MO310), hexaglycerol monooleate (PO310), hexaglycerol pentaoleate (PO500), decaglycerol monocaprate (MCA750), decaglycerol monooleate (MO750), decaglycerol sequioleate (SO750), decaglycerol decaoleate (DAO750), alone or in combination with cosurfactants. The cosurfactant, usually a short-chain alcohol such as ethanol, 1-propanol, and 1-butanol, serves to increase the interfacial fluidity by penetrating into the surfactant film and consequently creating a disordered film because of the void space generated among surfactant molecules. Microemulsions may, however, be prepared without the use of cosurfactants and alcohol-free self-emulsifying microemulsion systems are known in the art. The aqueous phase may typically be, but is not limited to, water, an aqueous solution of the drug, glycerol, PEG300, PEG400, polyglycerols, propylene glycols, and derivatives of ethylene glycol. The oil phase may include, but is not limited to, materials such as Captex 300, Captex 355, Capmul MCM, fatty acid esters, medium chain (C₈-C₁₂) mono, di, and tri-glycerides, polyoxyethylated glyceryl fatty acid esters, fatty alcohols, polyglycolized glycerides, saturated polyglycolized C8-C10 glycerides, vegetable oils and silicone oil.

[0091] Microemulsions are particularly of interest from the standpoint of drug solubilization and the enhanced absorption of drugs. Lipid based microemulsions (both o/w and w/o) have been proposed to enhance the oral bioavailability of drugs, including peptides (Constantinides et al., Pharmaceutical Research, 1994, 11, 1385-1390; Ritschel, Meth. Find. Exp. Clin. Pharmacol., 1993, 13, 205). Microemulsions afford advantages of improved drug solubilization, protection of drug from enzymatic hydrolysis, possible enhancement of drug absorption due to surfactant-induced alterations in membrane fluidity and permeability, ease of preparation, ease of oral administration over solid dosage forms, improved clinical potency, and decreased toxicity (Constantinides et al., Pharmaceutical Research, 1994, 11, 1385; Ho et al., J. Pharm. Sci., 1996, 85, 138-143). Often microemulsions may form spontaneously when their components are brought together at ambient temperature. This may be particularly advantageous when formulating thermolabile drugs, peptides or oligonucleotides. Microemulsions have also been effective in the transdermal delivery of active components in both cosmetic and pharmaceutical applications. It is expected that the microemulsion compositions and formulations of the present invention will facilitate the increased systemic absorption of oligonucleotides and nucleic acids from the gastrointestinal tract, as well as improve the local cellular uptake of oligonucleotides and nucleic acids within the gastrointestinal tract, vagina, buccal cavity and other areas of administration.

[0092] Microemulsions of the present invention may also contain additional components and additives such as sorbitan monostearate (Grill 3), Labrasol, and penetration enhancers to improve the properties of the formulation and to enhance the absorption of the oligonucleotides and nucleic acids of the present invention. Penetration enhancers used in the microemulsions of the present invention may be classified as belonging to one of five broad categories—surfactants, fatty acids, bile salts, chelating agents, and non-chelating non-surfactants (Lee et al., Critical Reviews in Therapeutic Drug Carrier Systems, 1991, p. 92). Each of these classes has been discussed above.

[0093] Liposomes

[0094] There are many organized surfactant structures besides microemulsions that have been studied and used for the formulation of drugs. These include monolayers, micelles, bilayers and vesicles. Vesicles, such as liposomes, have attracted great interest because of their specificity and the duration of action they offer from the standpoint of drug delivery. As used in the present invention, the term “liposome” means a vesicle composed of amphiphilic lipids arranged in a spherical bilayer or bilayers.

[0095] Liposomes are unilamellar or multilamellar vesicles which have a membrane formed from a lipophilic material and an aqueous interior. The aqueous portion contains the composition to be delivered. Cationic liposomes possess the advantage of being able to fuse to the cell wall. Non-cationic liposomes, although not able to fuse as efficiently with the cell wall, are taken up by macrophages in vivo.

[0096] In order to cross intact mammalian skin, lipid vesicles must pass through a series of fine pores, each with a diameter less than 50 nm, under the influence of a suitable transdermal gradient. Therefore, it is desirable to use a liposome which is highly deformable and able to pass through such fine pores.

[0097] Further advantages of liposomes include; liposomes obtained from natural phospholipids are biocompatible and biodegradable; liposomes can incorporate a wide range of water and lipid soluble drugs; liposomes can protect encapsulated drugs in their internal compartments from metabolism and degradation (Rosoff, in Pharmaceutical Dosage Forms, Lieberman, Rieger and Banker (Eds.), 1988, Marcel Dekker, Inc., New York, N.Y., volume 1, p. 245). Important considerations in the preparation of liposome formulations are the lipid surface charge, vesicle size and the aqueous volume of the liposomes.

[0098] Liposomes are useful for the transfer and delivery of active ingredients to the site of action. Because the liposomal membrane is structurally similar to biological membranes, when liposomes are applied to a tissue, the liposomes start to merge with the cellular membranes and as the merging of the liposome and cell progresses, the liposomal contents are emptied into the cell where the active agent may act.

[0099] Liposomal formulations have been the focus of extensive investigation as the mode of delivery for many drugs. There is growing evidence that for topical administration, liposomes present several advantages over other formulations. Such advantages include reduced side-effects related to high systemic absorption of the administered drug, increased accumulation of the administered drug at the desired target, and the ability to administer a wide variety of drugs, both hydrophilic and hydrophobic, into the skin.

[0100] Several reports have detailed the ability of liposomes to deliver agents including high-molecular weight DNA into the skin. Compounds including analgesics, antibodies, hormones and high-molecular weight DNAs have been administered to the skin. The majority of applications resulted in the targeting of the upper epidermis.

[0101] Liposomes fall into two broad classes. Cationic liposomes are positively charged liposomes which interact with the negatively charged DNA molecules to form a stable complex. The positively charged DNA/liposome complex binds to the negatively charged cell surface and is internalized in an endosome. Due to the acidic pH within the endosome, the liposomes are ruptured, releasing their contents into the cell cytoplasm (Wang et al., Biochem. Biophys. Res. Commun., 1987, 147, 980-985).

[0102] Liposomes which are pH-sensitive or negatively-charged, entrap DNA rather than complex with it. Since both the DNA and the lipid are similarly charged, repulsion rather than complex formation occurs. Nevertheless, some DNA is entrapped within the aqueous interior of these liposomes. pH-sensitive liposomes have been used to deliver DNA encoding the thymidine kinase gene to cell monolayers in culture. Expression of the exogenous gene was detected in the target cells (Zhou et al., Journal of Controlled Release, 1992, 19, 269-274).

[0103] One major type of liposomal composition includes phospholipids other than naturally-derived phosphatidylcholine. Neutral liposome compositions, for example, can be formed from dimyristoyl phosphatidylcholine (DMPC) or dipalmitoyl phosphatidylcholine (DPPC). Anionic liposome compositions generally are formed from dimyristoyl phosphatidylglycerol, while anionic fusogenic liposomes are formed primarily from dioleoyl phosphatidylethanolamine (DOPE). Another type of liposomal composition is formed from phosphatidylcholine (PC) such as, for example, soybean PC, and egg PC. Another type is formed from mixtures of phospholipid and/or phosphatidylcholine and/or cholesterol.

[0104] Several studies have assessed the topical delivery of liposomal drug formulations to the skin. Application of liposomes containing interferon to guinea pig skin resulted in a reduction of skin herpes sores while delivery of interferon via other means (e.g. as a solution or as an emulsion) were ineffective (Weiner et al., Journal of Drug Targeting, 1992, 2, 405-410). Further, an additional study tested the efficacy of interferon administered as part of a liposomal formulation to the administration of interferon using an aqueous system, and concluded that the liposomal formulation was superior to aqueous administration (du Plessis et al., Antiviral Research, 1992, 18, 259-265).

[0105] Non-ionic liposomal systems have also been examined to determine their utility in the delivery of drugs to the skin, in particular systems comprising non-ionic surfactant and cholesterol. Non-ionic liposomal formulations comprising Novasome™ I (glyceryl dilaurate/cholesterol/polyoxyethylene-10-stearyl ether) and Novasome™ II (glyceryl distearate/cholesterol/polyoxyethylene-10-stearyl ether) were used to deliver cyclosporin-A into the dermis of mouse skin. Results indicated that such non-ionic liposomal systems were effective in facilitating the deposition of cyclosporin-A into different layers of the skin (Hu et al. S. T. P. Pharma. Sci., 1994, 4, 6, 466).

[0106] Liposomes also include “sterically stabilized” liposomes, a term which, as used herein, refers to liposomes comprising one or more specialized lipids that, when incorporated into liposomes, result in enhanced circulation lifetimes relative to liposomes lacking such specialized lipids. Examples of sterically stabilized liposomes are those in which part of the vesicle-forming lipid portion of the liposome (A) comprises one or more glycolipids, such as monosialoganglioside G_{M1}, or (B) is derivatized with one or more hydrophilic polymers, such as a polyethylene glycol (PEG) moiety. While not wishing to be bound by any particular theory, it is thought in the art that, at least for sterically stabilized liposomes containing gangliosides, sphingomyelin, or PEG-derivatized lipids, the enhanced circulation half-life of these sterically stabilized liposomes derives from a reduced uptake into cells of the reticuloendothelial system (RES) (Allen et al., FEBS Letters, 1987, 223, 42; Wu et al., Cancer Research, 1993, 53, 3765).

[0107] Various liposomes comprising one or more glycolipids are known in the art. Papahadjopoulos et al. (Ann. N.Y. Acad. Sci., 1987, 507, 64) reported the ability of monosialoganglioside G_{M1}, galactocerebroside sulfate and phosphatidylinositol to improve blood half-lives of liposomes. These findings were expounded upon by Gabizon et al. (Proc. Natl. Acad. Sci. U.S.A., 1988, 85, 6949). U.S. Pat. No. 4,837,028 and WO 88/04924, both to Allen et al., disclose liposomes comprising (1) sphingomyelin and (2) the ganglioside G_{M1} or a galactocerebroside sulfate ester. U.S. Pat. No. 5,543,152 (Webb et al.) discloses liposomes comprising sphingomyelin. Liposomes comprising 1,2-sn-dimyristoylphosphatidylcholine are disclosed in WO 97/13499 (Lim et al.).

[0108] Many liposomes comprising lipids derivatized with one or more hydrophilic polymers, and methods of preparation thereof, are known in the art. Sunamoto et al. (Bull. Chem. Soc. Jpn., 1980, 53, 2778) described liposomes comprising a nonionic detergent, 2C₁₂15G, that contains a PEG moiety. Illum et al. (FEBS Lett., 1984, 167, 79) noted that hydrophilic coating of polystyrene particles with polymeric glycols results in significantly enhanced blood half-lives. Synthetic phospholipids modified by the attachment of carboxylic groups of polyalkylene glycols (e.g., PEG) are described by Sears (U.S. Pat. Nos. 4,426,330 and 4,534,899). Klibanov et al. (FEBS Lett., 1990, 268, 235) described experiments demonstrating that liposomes comprising phosphatidylethanolamine (PE) derivatized with PEG or PEG stearate have significant increases in blood circulation half-lives. Blume et al. (Biochimica et Biophysica Acta, 1990, 1029, 91) extended such observations to other PEG-derivatized phospholipids, e.g., DSPE-PEG, formed from the combination of distearoylphosphatidylethanolamine (DSPE) and PEG. Liposomes having covalently bound PEG moieties on their external surface are described in European Patent No. EP 0 445 131 B1 and WO 90/04384 to Fisher. Liposome compositions containing 1-20 mole percent of PE derivatized with PEG, and methods of use thereof, are described by Woodle et al. (U.S. Pat. Nos. 5,013,556 and 5,356,633) and Martin et al. (U.S. Pat. No. 5,213,804 and European Patent No. EP 0 496 813 B1). Liposomes comprising a number of other lipid-polymer conjugates are disclosed in WO 91/05545 and U.S. Pat. No. 5,225,212 (both to Martin et al.) and in WO 94/20073 (Zalipsky et al.) Liposomes comprising PEG-modified ceramide lipids are described in WO 96/10391 (Choi et al.). U.S. Pat. No. 5,540,935 (Miyazaki et al.) and U.S. Pat. No. 5,556,948 (Tagawa et al.) describe PEG-containing liposomes that can be further derivatized with functional moieties on their surfaces.

[0109] A limited number of liposomes comprising nucleic acids are known in the art. WO 96/40062 to Thierry et al. discloses methods for encapsulating high molecular weight nucleic acids in liposomes. U.S. Pat. No. 5,264,221 to Tagawa et al. discloses protein-bonded liposomes and asserts that the contents of such liposomes may include an antisense RNA. U.S. Pat. No. 5,665,710 to Rahman et al. describes certain methods of encapsulating oligodeoxynucleotides in liposomes. WO 97/04787 to Love et al. discloses liposomes comprising antisense oligonucleotides targeted to the raf gene.

[0110] Transfersomes are yet another type of liposomes, and are highly deformable lipid aggregates which are attractive candidates for drug delivery vehicles. Transfersomes may be described as lipid droplets which are so highly deformable that they are easily able to penetrate through pores which are smaller than the droplet. Transfersomes are adaptable to the environment in which they are used, e.g. they are self-optimizing (adaptive to the shape of pores in the skin), self-repairing, frequently reach their targets without fragmenting, and often self-loading. To make transfersomes it is possible to add surface edge-activators, usually surfactants, to a standard liposomal composition. Transfersomes have been used to deliver serum albumin to the skin. The transfersome-mediated delivery of serum albumin has been shown to be as effective as subcutaneous injection of a solution containing serum albumin.

[0111] Surfactants find wide application in formulations such as emulsions (including microemulsions) and liposomes. The most common way of classifying and ranking the properties of the many different types of surfactants, both natural and synthetic, is by the use of the hydrophile/lipophile balance (HLB). The nature of the hydrophilic group (also known as the “head”) provides the most useful means for categorizing the different surfactants used in formulations (Rieger, in Pharmaceutical Dosage Forms, Marcel Dekker, Inc., New York, N.Y., 1988, p. 285).

[0112] If the surfactant molecule is not ionized, it is classified as a nonionic surfactant. Nonionic surfactants find wide application in pharmaceutical and cosmetic products and are usable over a wide range of pH values. In general their HLB values range from 2 to about 18 depending on their structure. Nonionic surfactants include nonionic esters such as ethylene glycol esters, propylene glycol esters, glyceryl esters, polyglyceryl esters, sorbitan esters, sucrose esters, and ethoxylated esters. Nonionic alkanolamides and ethers such as fatty alcohol ethoxylates, propoxylated alcohols, and ethoxylated/propoxylated block polymers are also included in this class. The polyoxyethylene surfactants are the most popular members of the nonionic surfactant class.

[0113] If the surfactant molecule carries a negative charge when it is dissolved or dispersed in water, the surfactant is classified as anionic. Anionic surfactants include carboxylates such as soaps, acyl lactylates, acyl amides of amino acids, esters of sulfuric acid such as alkyl sulfates and ethoxylated alkyl sulfates, sulfonates such as alkyl benzene sulfonates, acyl isethionates, acyl taurates and sulfosuccinates, and phosphates. The most important members of the anionic surfactant class are the alkyl sulfates and the soaps.

[0114] If the surfactant molecule carries a positive charge when it is dissolved or dispersed in water, the surfactant is classified as cationic. Cationic surfactants include quaternary ammonium salts and ethoxylated amines. The quaternary ammonium salts are the most used members of this class.

[0115] If the surfactant molecule has the ability to carry either a positive or negative charge, the surfactant is classified as amphoteric. Amphoteric surfactants include acrylic acid derivatives, substituted alkylamides, N-alkylbetaines and phosphatides.

[0116] The use of surfactants in drug products, formulations and in emulsions has been reviewed (Rieger, in Pharmaceutical Dosage Forms, Marcel Dekker, Inc., New York, N.Y., 1988, p. 285).

[0117] Penetration Enhancers

[0118] In one embodiment, the present invention employs various penetration enhancers to effect the efficient delivery of nucleic acids, particularly oligonucleotides, to the skin of animals. Most drugs are present in solution in both ionized and nonionized forms. However, usually only lipid soluble or lipophilic drugs readily cross cell membranes. It has been discovered that even non-lipophilic drugs may cross cell membranes if the membrane to be crossed is treated with a penetration enhancer. In addition to aiding the diffusion of non-lipophilic drugs across cell membranes, penetration enhancers also enhance the permeability of lipophilic drugs.

[0119] Penetration enhancers may be classified as belonging to one of five broad categories, i.e., surfactants, fatty acids, bile salts, chelating agents, and non-chelating non-surfactants (Lee et al., Critical Reviews in Therapeutic Drug Carrier Systems, 1991, p.92). Each of the above mentioned classes of penetration enhancers are described below in greater detail.

[0120] Surfactants: In connection with the present invention, surfactants (or “surface-active agents”) are chemical entities which, when dissolved in an aqueous solution, reduce the surface tension of the solution or the interfacial tension between the aqueous solution and another liquid, with the result that absorption of oligonucleotides through the mucosa is enhanced. In addition to bile salts and fatty acids, these penetration enhancers include, for example, sodium lauryl sulfate, polyoxyethylene-9-lauryl ether and polyoxyethylene-20-cetyl ether) (Lee et al., Critical Reviews in Therapeutic Drug Carrier Systems, 1991, p.92); and perfluorochemical emulsions, such as FC-43. Takahashi et al., J. Pharm. Pharmacol., 1988, 40, 252).

[0121] Fatty acids: Various fatty acids and their derivatives which act as penetration enhancers include, for example, oleic acid, lauric acid, capric acid (n-decanoic acid), myristic acid, palmitic acid, stearic acid, linoleic acid, linolenic acid, dicaprate, tricaprate, monoolein (1-monooleoyl-rac-glycerol), dilaurin, caprylic acid, arachidonic acid, glycerol 1-monocaprate, 1-dodecylazacycloheptan-2-one, acylcarnitines, acylcholines, C₁₋₁₀ alkyl esters thereof (e.g., methyl, isopropyl and t-butyl), and mono- and di-glycerides thereof (i.e., oleate, laurate, caprate, myristate, palmitate, stearate, linoleate, etc.) (Lee et al., Critical Reviews in Therapeutic Drug Carrier Systems, 1991, p.92; Muranishi, Critical Reviews in Therapeutic Drug Carrier Systems, 1990, 7, 1-33; El Hariri et al., J. Pharm. Pharmacol., 1992, 44, 651-654).

[0122] Bile salts: The physiological role of bile includes the facilitation of dispersion and absorption of lipids and fat-soluble vitamins (Brunton, Chapter 38 in: Goodman & Gilman's The Pharmacological Basis of Therapeutics, 9th Ed., Hardman et al. Eds., McGraw-Hill, New York, 1996, pp. 934-935). Various natural bile salts, and their synthetic derivatives, act as penetration enhancers. Thus the term “bile salts” includes any of the naturally occurring components of bile as well as any of their synthetic derivatives. The bile salts of the invention include, for example, cholic acid (or its pharmaceutically acceptable sodium salt, sodium cholate), dehydrocholic acid (sodium dehydrocholate), deoxycholic acid (sodium deoxycholate), glucholic acid (sodium glucholate), glycholic acid (sodium glycocholate), glycodeoxycholic acid (sodium glycodeoxycholate), taurocholic acid (sodium taurocholate), taurodeoxycholic acid (sodium taurodeoxycholate), chenodeoxycholic acid (sodium chenodeoxycholate), ursodeoxycholic acid (UDCA), sodium tauro-24,25-dihydro-fusidate (STDHF), sodium glycodihydrofusidate and polyoxyethylene-9-lauryl ether (POE) (Lee et al., Critical Reviews in Therapeutic Drug Carrier Systems, 1991, page 92; Swinyard, Chapter 39 In: Remington's Pharmaceutical Sciences, 18th Ed., Gennaro, ed., Mack Publishing Co., Easton, Pa., 1990, pages 782-783; Muranishi, Critical Reviews in Therapeutic Drug Carrier Systems, 1990, 7, 1-33; Yamamoto et al., J. Pharm. Exp. Ther., 1992, 263, 25; Yamashita et al., J. Pharm. Sci., 1990, 79, 579-583).

[0123] Chelating Agents: Chelating agents, as used in connection with the present invention, can be defined as compounds that remove metallic ions from solution by forming complexes therewith, with the result that absorption of oligonucleotides through the mucosa is enhanced. With regards to their use as penetration enhancers in the present invention, chelating agents have the added advantage of also serving as DNase inhibitors, as most characterized DNA nucleases require a divalent metal ion for catalysis and are thus inhibited by chelating agents (Jarrett, J. Chromatogr., 1993, 618, 315-339). Chelating agents of the invention include but are not limited to disodium ethylenediaminetetraacetate (EDTA), citric acid, salicylates (e.g., sodium salicylate, 5-methoxysalicylate and homovanilate), N-acyl derivatives of collagen, laureth-9 and N-amino acyl derivatives of beta-diketones (enamines) (Lee et al., Critical Reviews in Therapeutic Drug Carrier Systems, 1991, page 92; Muranishi, Critical Reviews in Therapeutic Drug Carrier Systems, 1990, 7, 1-33; Buur et al., J. Control Rel., 1990, 14, 43-51).

[0124] Non-chelating non-surfactants: As used herein, non-chelating non-surfactant penetration enhancing compounds can be defined as compounds that demonstrate insignificant activity as chelating agents or as surfactants but that nonetheless enhance absorption of oligonucleotides through the alimentary mucosa (Muranishi, Critical Reviews in Therapeutic Drug Carrier Systems, 1990, 7, 1-33). This class of penetration enhancers include, for example, unsaturated cyclic ureas, 1-alkyl- and 1-alkenylazacyclo-alkanone derivatives (Lee et al., Critical Reviews in Therapeutic Drug Carrier Systems, 1991, page 92); and non-steroidal anti-inflammatory agents such as diclofenac sodium, indomethacin and phenylbutazone (Yamashita et al., J. Pharm. Pharmacol., 1987, 39, 621-626).

[0125] Agents that enhance uptake of oligonucleotides at the cellular level may also be added to the pharmaceutical and other compositions of the present invention. For example, cationic lipids, such as lipofectin (Junichi et al, U.S. Pat. No. 5,705,188), cationic glycerol derivatives, and polycationic molecules, such as polylysine (Lollo et al., PCT Application WO 97/30731), are also known to enhance the cellular uptake of oligonucleotides.

[0126] Other agents may be utilized to enhance the penetration of the administered nucleic acids, including glycols such as ethylene glycol and propylene glycol, pyrrols such as 2-pyrrol, azones, and terpenes such as limonene and menthone.

[0127] Carriers

[0128] Certain compositions of the present invention also incorporate carrier compounds in the formulation. As used herein, “carrier compound” or “carrier” can refer to a nucleic acid, or analog thereof, which is inert (i.e., does not possess biological activity per se) but is recognized as a nucleic acid by in vivo processes that reduce the bioavailability of a nucleic acid having biological activity by, for example, degrading the biologically active nucleic acid or promoting its removal from circulation. The coadministration of a nucleic acid and a carrier compound, typically with an excess of the latter substance, can result in a substantial reduction of the amount of nucleic acid recovered in the liver, kidney or other extracirculatory reservoirs, presumably due to competition between the carrier compound and the nucleic acid for a common receptor. For example, the recovery of a partially phosphorothioate oligonucleotide in hepatic tissue can be reduced when it is coadministered with polyinosinic acid, dextran sulfate, polycytidic acid or 4-acetamido-4′isothiocyano-stilbene-2,2′-disulfonic acid (Miyao et al., Antisense Res. Dev., 1995, 5, 115-121; Takakura et al., Antisense & Nucl. Acid Drug Dev., 1996, 6, 177-183).

[0129] Excipients

[0130] In contrast to a carrier compound, a “pharmaceutical carrier” or “excipient” is a pharmaceutically acceptable solvent, suspending agent or any other pharmacologically inert vehicle for delivering one or more nucleic acids to an animal. The excipient may be liquid or solid and is selected, with the planned manner of administration in mind, so as to provide for the desired bulk, consistency, etc., when combined with a nucleic acid and the other components of a given pharmaceutical composition. Typical pharmaceutical carriers include, but are not limited to, binding agents (e.g., pregelatinized maize starch, polyvinylpyrrolidone or hydroxypropyl methylcellulose, etc.); fillers (e.g., lactose and other sugars, microcrystalline cellulose, pectin, gelatin, calcium sulfate, ethyl cellulose, polyacrylates or calcium hydrogen phosphate, etc.); lubricants (e.g., magnesium stearate, talc, silica, colloidal silicon dioxide, stearic acid, metallic stearates, hydrogenated vegetable oils, corn starch, polyethylene glycols, sodium benzoate, sodium acetate, etc.); disintegrants (e.g., starch, sodium starch glycolate, etc.); and wetting agents (e.g., sodium lauryl sulphate, etc.).

[0131] Pharmaceutically acceptable organic or inorganic excipient suitable for non-parenteral administration which do not deleteriously react with nucleic acids can also be used to formulate the compositions of the present invention. Suitable pharmaceutically acceptable carriers include, but are not limited to, water, salt solutions, alcohols, polyethylene glycols, gelatin, lactose, amylose, magnesium stearate, talc, silicic acid, viscous paraffin, hydroxymethylcellulose, polyvinylpyrrolidone and the like.

[0132] Formulations for topical administration of nucleic acids may include sterile and non-sterile aqueous solutions, non-aqueous solutions in common solvents such as alcohols, or solutions of the nucleic acids in liquid or solid oil bases. The solutions may also contain buffers, diluents and other suitable additives. Pharmaceutically acceptable organic or inorganic excipients suitable for non-parenteral administration which do not deleteriously react with nucleic acids can be used.

[0133] Suitable pharmaceutically acceptable excipients include, but are not limited to, water, salt solutions, alcohol, polyethylene glycols, gelatin, lactose, amylose, magnesium stearate, talc, silicic acid, viscous paraffin, hydroxymethylcellulose, polyvinylpyrrolidone and the like.

[0134] Other Components

[0135] The compositions of the present invention may additionally contain other adjunct components conventionally found in pharmaceutical compositions, at their art-established usage levels. Thus, for example, the compositions may contain additional, compatible, pharmaceutically-active materials such as, for example, antipruritics, astringents, local anesthetics or anti-inflammatory agents, or may contain additional materials useful in physically formulating various dosage forms of the compositions of the present invention, such as dyes, flavoring agents, preservatives, antioxidants, opacifiers, thickening agents and stabilizers. However, such materials, when added, should not unduly interfere with the biological activities of the components of the compositions of the present invention. The formulations can be sterilized and, if desired, mixed with auxiliary agents, e.g., lubricants, preservatives, stabilizers, wetting agents, emulsifiers, salts for influencing osmotic pressure, buffers, colorings, flavorings and/or aromatic substances and the like which do not deleteriously interact with the nucleic acid(s) of the formulation.

[0136] Aqueous suspensions may contain substances which increase the viscosity of the suspension including, for example, sodium carboxymethylcellulose, sorbitol and/or dextran. The suspension may also contain stabilizers.

[0137] Certain embodiments of the invention provide pharmaceutical compositions containing (a) one or more antisense compounds and (b) one or more other chemotherapeutic agents which function by a non-antisense mechanism. Examples of such chemotherapeutic agents include but are not limited to daunorubicin, daunomycin, dactinomycin, doxorubicin, epirubicin, idarubicin, esorubicin, bleomycin, mafosfamide, ifosfamide, cytosine arabinoside, bis-chloroethylnitrosurea, busulfan, mitomycin C, actinomycin D, mithramycin, prednisone, hydroxyprogesterone, testosterone, tamoxifen, dacarbazine, procarbazine, hexamethylmelamine, pentamethylmelamine, mitoxantrone, amsacrine, chlorambucil, methylcyclohexylnitrosurea, nitrogen mustards, melphalan, cyclophosphamide, 6-mercaptopurine, 6-thioguanine, cytarabine, 5-azacytidine, hydroxyurea, deoxycoformycin, 4-hydroxyperoxycyclophosphoramide, 5-fluorouracil (5-FU), 5-fluorodeoxyuridine (5-FUdR), methotrexate (MTX), colchicine, taxol, vincristine, vinblastine, etoposide (VP-16), trimetrexate, irinotecan, topotecan, gemcitabine, teniposide, cisplatin and diethylstilbestrol (DES). See, generally, The Merck Manual of Diagnosis and Therapy, 15th Ed. 1987, pp. 1206-1228, Berkow et al., eds., Rahway, N.J. When used with the compounds of the invention, such chemotherapeutic agents may be used individually (e.g., 5-FU and oligonucleotide), sequentially (e.g., 5-FU and oligonucleotide for a period of time followed by MTX and oligonucleotide), or in combination with one or more other such chemotherapeutic agents (e.g., 5-FU, MTX and oligonucleotide, or 5-FU, radiotherapy and oligonucleotide). Anti-inflammatory drugs, including but not limited to nonsteroidal anti-inflammatory drugs and corticosteroids, and antiviral drugs, including but not limited to ribivirin, vidarabine, acyclovir and ganciclovir, may also be combined in compositions of the invention. See, generally, The Merck Manual of Diagnosis and Therapy, 15th Ed., Berkow et al., eds., 1987, Rahway, N.J., pages 2499-2506 and 46-49, respectively). Other non-antisense chemotherapeutic agents are also within the scope of this invention. Two or more combined compounds may be used together or sequentially.

[0138] In another related embodiment, compositions of the invention may contain one or more antisense compounds, particularly oligonucleotides, targeted to a first nucleic acid and one or more additional antisense compounds targeted to a second nucleic acid target. Numerous examples of antisense compounds are known in the art. Two or more combined compounds may be used together or sequentially.

[0139] The formulation of therapeutic compositions and their subsequent administration is believed to be within the skill of those in the art. Dosing is dependent on severity and responsiveness of the disease state to be treated, with the course of treatment lasting from several days to several months, or until a cure is effected or a diminution of the disease state is achieved. Optimal dosing schedules can be calculated from measurements of drug accumulation in the body of the patient. Persons of ordinary skill can easily determine optimum dosages, dosing methodologies and repetition rates. Optimum dosages may vary depending on the relative potency of individual oligonucleotides, and can generally be estimated based on EC₅₀s found to be effective in in vitro and in vivo animal models. In general, dosage is from 0.01 ug to 100 g per kg of body weight, and may be given once or more daily, weekly, monthly or yearly, or even once every 2 to 20 years. Persons of ordinary skill in the art can easily estimate repetition rates for dosing based on measured residence times and concentrations of the drug in bodily fluids or tissues. Following successful treatment, it may be desirable to have the patient undergo maintenance therapy to prevent the recurrence of the disease state, wherein the oligonucleotide is administered in maintenance doses, ranging from 0.01 ug to 100 g per kg of body weight, once or more daily, to once every 20 years.

[0140] While the present invention has been described with specificity in accordance with certain of its preferred embodiments, the following examples serve only to illustrate the invention and are not intended to limit the same.

### EXAMPLES

### Example 1

[0141] Nucleoside Phosphoramidites for Oligonucleotide Synthesis Deoxy and 2′-alkoxy Amidites

[0142] 2′-Deoxy and 2′-methoxy beta-cyanoethyldiisopropyl phosphoramidites were purchased from commercial sources (e.g. Chemgenes, Needham Mass. or Glen Research, Inc. Sterling Va.). Other 2′-O-alkoxy substituted nucleoside amidites are prepared as described in U.S. Pat. No. 5,506,351, herein incorporated by reference. For oligonucleotides synthesized using 2′-alkoxy amidites, optimized synthesis cycles were developed that incorporate multiple steps coupling longer wait times relative to standard synthesis cycles.

[0143] The following abbreviations are used in the text: thin layer chromatography (TLC), melting point (MP), high pressure liquid chromatography (HPLC), Nuclear Magnetic Resonance (NMR), argon (Ar), methanol (MeOH), dichloromethane (CH₂Cl₂), triethylamine (TEA), dimethyl formamide (DMF), ethyl acetate (EtOAc), dimethyl sulfoxide (DMSO), tetrahydrofuran (THF).

[0144] Oligonucleotides containing 5-methyl-2′-deoxycytidine (5-Me-dC) nucleotides were synthesized according to published methods (Sanghvi, et. al., Nucleic Acids Research, 1993, 21, 3197-3203) using commercially available phosphoramidites (Glen Research, Sterling Va. or ChemGenes, Needham Mass.) or prepared as follows:

[0145] Preparation of 5′-O-Dimethoxytrityl-thymidine Intermediate for 5-methyl dC Amidite

[0146] To a 50 L glass reactor equipped with air stirrer and Ar gas line was added thymidine (1.00 kg, 4.13 mol) in anhydrous pyridine (6 L) at ambient temperature. Dimethoxytrityl (DMT) chloride (1.47 kg, 4.34 mol, 1.05 eq) was added as a solid in four portions over 1 h. After 30 min, TLC indicated approx. 95% product, 2% thymidine, 5% DMT reagent and by-products and 2% 3′,5′-bis DMT product (R_{f} in EtOAc 0.45, 0.05, 0.98, 0.95 respectively). Saturated sodium bicarbonate (4 L) and CH₂Cl₂ were added with stirring (pH of the aqueous layer 7.5). An additional 18 L of water was added, the mixture was stirred, the phases were separated, and the organic layer was transferred to a second 50 L vessel. The aqueous layer was extracted with additional CH₂Cl₂ (2×2 L). The combined organic layer was washed with water (10 L) and then concentrated in a rotary evaporator to approx. 3.6 kg total weight. This was redissolved in CH₂Cl₂ (3.5 L), added to the reactor followed by water (6 L) and hexanes (13 L). The mixture was vigorously stirred and seeded to give a fine white suspended solid starting at the interface. After stirring for 1 h, the suspension was removed by suction through a ½″ diameter teflon tube into a 20 L suction flask, poured onto a 25 cm Coors Buchner funnel, washed with water (2×3 L) and a mixture of hexanes —CH₂Cl₂ (4:1, 2×3 L) and allowed to air dry overnight in pans (1″ deep). This was further dried in a vacuum oven (75° C., 0.1 mm Hg, 48 h) to a constant weight of 2072 g (93%) of a white solid, (mp 122-124° C.). TLC indicated a trace contamination of the bis DMT product. NMR spectroscopy also indicated that 1-2 mole percent pyridine and about 5 mole percent of hexanes was still present.

[0147] Preparation of 5′-O-Dimethoxytrityl-2′-deoxy-5-methylcytidine Intermediate for 5-methyl-dC Amidite

[0148] To a 50 L Schott glass-lined steel reactor equipped with an electric stirrer, reagent addition pump (connected to an addition funnel), heating/cooling system, internal thermometer and an Ar gas line was added 5′-O-dimethoxytrityl-thymidine (3.00 kg, 5.51 mol), anhydrous acetonitrile (25 L) and TEA (12.3 L, 88.4 mol, 16 eq). The mixture was chilled with stirring to −10° C. internal temperature (external −20° C.). Trimethylsilylchloride (2.1 L, 16.5 mol, 3.0 eq) was added over 30 minutes while maintaining the internal temperature below −5° C., followed by a wash of anhydrous acetonitrile (1 L). Note: the reaction is mildly exothermic and copious hydrochloric acid fumes form over the course of the addition. The reaction was allowed to warm to 0° C. and the reaction progress was confirmed by TLC (EtOAc-hexanes 4:1; R_{f} 0.43 to 0.84 of starting material and silyl product, respectively). Upon completion, triazole (3.05 kg, 44 mol, 8.0 eq) was added the reaction was cooled to −20° C. internal temperature (external −30° C.). Phosphorous oxychloride (1035 mL, 11.1 mol, 2.01 eq) was added over 60 min so as to maintain the temperature between −20° C. and −10° C. during the strongly exothermic process, followed by a wash of anhydrous acetonitrile (1 L). The reaction was warmed to 0° C. and stirred for 1 h. TLC indicated a complete conversion to the triazole product (R_{f} 0.83 to 0.34 with the product spot glowing in long wavelength UV light). The reaction mixture was a peach-colored thick suspension, which turned darker red upon warming without apparent decomposition. The reaction was cooled to −15° C. internal temperature and water (5 L) was slowly added at a rate to maintain the temperature below +10° C. in order to quench the reaction and to form a homogenous solution. (Caution: this reaction is initially very strongly exothermic). Approximately one-half of the reaction volume (22 L) was transferred by air pump to another vessel, diluted with EtOAc (12 L) and extracted with water (2×8 L). The combined water layers were back-extracted with EtOAc (6 L). The water layer was discarded and the organic layers were concentrated in a 20 L rotary evaporator to an oily foam. The foam was coevaporated with anhydrous acetonitrile (4 L) to remove EtOAc. (note: dioxane may be used instead of anhydrous acetonitrile if dried to a hard foam). The second half of the reaction was treated in the same way. Each residue was dissolved in dioxane (3 L) and concentrated ammonium hydroxide (750 mL) was added. A homogenous solution formed in a few minutes and the reaction was allowed to stand overnight (although the reaction is complete within 1 h).

[0149] TLC indicated a complete reaction (product R_{f} 0.35 in EtOAc-MeOH 4:1). The reaction solution was concentrated on a rotary evaporator to a dense foam. Each foam was slowly redissolved in warm EtOAc (4 L; 50° C.), combined in a 50 L glass reactor vessel, and extracted with water (2×4L) to remove the triazole by-product. The water was back-extracted with EtOAc (2 L). The organic layers were combined and concentrated to about 8 kg total weight, cooled to 0° C. and seeded with crystalline product. After 24 hours, the first crop was collected on a 25 cm Coors Buchner funnel and washed repeatedly with EtOAc (3×3L) until a white powder was left and then washed with ethyl ether (2×3L). The solid was put in pans (1″ deep) and allowed to air dry overnight. The filtrate was concentrated to an oil, then redissolved in EtOAc (2 L), cooled and seeded as before. The second crop was collected and washed as before (with proportional solvents) and the filtrate was first extracted with water (2×1L) and then concentrated to an oil. The residue was dissolved in EtOAc (1 L) and yielded a third crop which was treated as above except that more washing was required to remove a yellow oily layer.

[0150] After air-drying, the three crops were dried in a vacuum oven (50° C., 0.1 mm Hg, 24 h) to a constant weight (1750, 600 and 200 g, respectively) and combined to afford 2550 g (85%) of a white crystalline product (MP 215-217° C.) when TLC and NMR spectroscopy indicated purity. The mother liquor still contained mostly product (as determined by TLC) and a small amount of triazole (as determined by NMR spectroscopy), bis DMT product and unidentified minor impurities. If desired, the mother liquor can be purified by silica gel chromatography using a gradient of MeOH (0-25%) in EtOAc to further increase the yield.

[0151] Preparation of 5′-O-Dimethoxytrityl-2′-deoxy-N-4-benzoyl-5-methylcytidine Penultimate Intermediate for 5-methyl dC Amidite

[0152] Crystalline 5′-O-dimethoxytrityl-5-methyl-2′-deoxycytidine (2000 g, 3.68 mol) was dissolved in anhydrous DMF (6.0 kg) at ambient temperature in a 50 L glass reactor vessel equipped with an air stirrer and argon line. Benzoic anhydride (Chem Impex not Aldrich, 874 g, 3.86 mol, 1.05 eq) was added and the reaction was stirred at ambient temperature for 8 h. TLC (CH₂Cl₂-EtOAc; CH₂Cl₂-EtOAc 4:1; R_{f} 0.25) indicated approx. 92% complete reaction. An additional amount of benzoic anhydride (44 g, 0.19 mol) was added. After a total of 18 h, TLC indicated approx. 96% reaction completion. The solution was diluted with EtOAc (20 L), TEA (1020 mL, 7.36 mol, ca 2.0 eq) was added with stirring, and the mixture was extracted with water (15 L, then 2×10 L). The aqueous layer was removed (no back-extraction was needed) and the organic layer was concentrated in 2×20 L rotary evaporator flasks until a foam began to form. The residues were coevaporated with acetonitrile (1.5 L each) and dried (0.1 mm Hg, 25° C., 24 h) to 2520 g of a dense foam. High pressure liquid chromatography (HPLC) revealed a contamination of 6.3% of N4, 3′-O-dibenzoyl product, but very little other impurities.

[0153] THe product was purified by Biotage column chromatography (5 kg Biotage) prepared with 65:35:1 hexanes-EtOAc-TEA (4L). The crude product (800 g),dissolved in CH₂Cl₂ (2 L), was applied to the column. The column was washed with the 65:35:1 solvent mixture (20 kg), then 20:80:1 solvent mixture (10 kg), then 99:1 EtOAc:TEA (17 kg). The fractions containing the product were collected, and any fractions containing the product and impurities were retained to be resubjected to column chromatography. The column was re-equilibrated with the original 65:35:1 solvent mixture (17 kg). A second batch of crude product (840 g) was applied to the column as before. The column was washed with the following solvent gradients: 65:35:1 (9 kg), 55:45:1 (20 kg), 20:80:1 (10 kg), and 99:1 EtOAc:TEA(15 kg). The column was reequilibrated as above, and a third batch of the crude product (850 g) plus impure fractions recycled from the two previous columns (28 g) was purified following the procedure for the second batch. The fractions containing pure product combined and concentrated on a 20L rotary evaporator, co-evaporated with acetontirile (3 L) and dried (0.1 mm Hg, 48 h, 25° C.) to a constant weight of 2023 g (85%) of white foam and 20 g of slightly contaminated product from the third run. HPLC indicated a purity of 99.8% with the balance as the diBenzoyl product.

[0154] [5′-O-(4,4′-Dimethoxytriphenylmethyl)-2′-deoxy-N⁴-benzoyl-5-methylcytidin-3′-O-yl]-2-cyanoethyl-N,N-diisopropylphosphoramidite (5-methyl dC Amidite)

[0155] 5′-O-(4,4′-Dimethoxytriphenylmethyl)-2′-deoxy-N 4-benzoyl-5-methylcytidine (998 g, 1.5 mol) was dissolved in anhydrous DMF (2 L). The solution was co-evaporated with toluene (300 ml) at 50° C. under reduced pressure, then cooled to room temperature and 2-cyanoethyl tetraisopropylphosphorodiamidite (680 g, 2.26 mol) and tetrazole (52.5 g, 0.75 mol) were added. The mixture was shaken until all tetrazole was dissolved, N-methylimidazole (15 ml) was added and the mixture was left at room temperature for 5 hours. TEA (300 ml) was added, the mixture was diluted with DMF (2.5 L) and water (600 ml), and extracted with hexane (3×3 L). The mixture was diluted with water (1.2 L) and extracted with a mixture of toluene (7.5 L) and hexane (6 L). The two layers were separated, the upper layer was washed with DMF-water (7:3 v/v, 3×2 L) and water (3×2 L), and the phases were separated. The organic layer was dried (Na₂SO₄), filtered and rotary evaporated. The residue was co-evaporated with acetonitrile (2×2 L) under reduced pressure and dried to a constant weight (25° C., 0.1 mm Hg, 40 h) to afford 1250 g an off-white foam solid (96%).

[0156] 2′-Fluoro Amidites

[0157] 2′-Fluorodeoxyadenosine Amidites

[0158] 2′-fluoro oligonucleotides were synthesized as described previously [Kawasaki, et. al., J. Med. Chem., 1993, 36, 831-841] and U.S. Pat. No. 5,670,633, herein incorporated by reference. The preparation of 2′-fluoropyrimidines containing a 5-methyl substitution are described in U.S. Pat. No. 5,861,493. Briefly, the protected nucleoside N6-benzoyl-2′-deoxy-2′-fluoroadenosine was synthesized utilizing commercially available 9-beta-D-arabinofuranosyladenine as starting material and whereby the 2′-alpha-fluoro atom is introduced by a S_{N}2-displacement of a 2′-beta-triflate group. Thus N6-benzoyl-9-beta-D-arabinofuranosyladenine was selectively protected in moderate yield as the 3′,5′-ditetrahydropyranyl (THP) intermediate. Deprotection of the THP and N6-benzoyl groups was accomplished using standard methodologies to obtain the 5′-dimethoxytrityl-(DMT) and 5′-DMT-3′-phosphoramidite intermediates.

[0159] 2′-Fluorodeoxyguanosine

[0160] The synthesis of 2′-deoxy-2′-fluoroguanosine was accomplished using tetraisopropyldisiloxanyl (TPDS) protected 9-beta-D-arabinofuranosylguanine as starting material, and conversion to the intermediate isobutyrylarabinofuranosylguanosine. Alternatively, isobutyrylarabinofuranosylguanosine was prepared as described by Ross et al., (Nucleosides & Nucleosides, 16, 1645, 1997). Deprotection of the TPDS group was followed by protection of the hydroxyl group with THP to give isobutyryl di-THP protected arabinofuranosylguanine. Selective O-deacylation and triflation was followed by treatment of the crude product with fluoride, then deprotection of the THP groups. Standard methodologies were used to obtain the 5′-DMT- and 5′-DMT-3′-phosphoramidites.

[0161] 2′-Fluorouridine

[0162] Synthesis of 2′-deoxy-2′-fluorouridine was accomplished by the modification of a literature procedure in which 2,2′-anhydro-1-beta-D-arabinofuranosyluracil was treated with 70% hydrogen fluoride-pyridine. Standard procedures were used to obtain the 5′-DMT and 5′-DMT-3′phosphoramidites.

[0163] 2′-Fluorodeoxycytidine

[0164] 2′-deoxy-2′-fluorocytidine was synthesized via amination of 2′-deoxy-2′-fluorouridine, followed by selective protection to give N4-benzoyl-2′-deoxy-2′-fluorocytidine. Standard procedures were used to obtain the 5′-DMT and 5′-DMT-3′phosphoramidites.

[0165] 2′-O-(2-Methoxyethyl) Modified Amidites

[0166] 2′-O-Methoxyethyl-substituted nucleoside amidites (otherwise known as MOE amidites) are prepared as follows, or alternatively, as per the methods of Martin, P., (Helvetica Chimica Acta, 1995, 78, 486-504).

[0167] Preparation of 2′-O-(2-methoxyethyl)-5-methyluridine Intermediate

[0168] 2,2′-Anhydro-5-methyl-uridine (2000 g, 8.32 mol), tris(2-methoxyethyl)borate (2504 g, 10.60 mol), sodium bicarbonate (60 g, 0.70 mol) and anhydrous 2-methoxyethanol (5 L) were combined in a 12 L three necked flask and heated to 130° C. (internal temp) at atmospheric pressure, under an argon atmosphere with stirring for 21 h. TLC indicated a complete reaction. The solvent was removed under reduced pressure until a sticky gum formed (50-85° C. bath temp and 100-11 mm Hg) and the residue was redissolved in water (3 L) and heated to boiling for 30 min in order the hydrolyze the borate esters. The water was removed under reduced pressure until a foam began to form and then the process was repeated. HPLC indicated about 77% product, 15% dimer (5′ of product attached to 2′ of starting material) and unknown derivatives, and the balance was a single unresolved early eluting peak.

[0169] The gum was redissolved in brine (3 L), and the flask was rinsed with additional brine (3 L). The combined aqueous solutions were extracted with chloroform (20 L) in a heavier-than continuous extractor for 70 h. The chloroform layer was concentrated by rotary evaporation in a 20 L flask to a sticky foam (2400 g). This was coevaporated with MeOH (400 mL) and EtOAc (8 L) at 75° C. and 0.65 atm until the foam dissolved at which point the vacuum was lowered to about 0.5 atm. After 2.5 L of distillate was collected a precipitate began to form and the flask was removed from the rotary evaporator and stirred until the suspension reached ambient temperature. EtOAc (2 L) was added and the slurry was filtered on a 25 cm table top Buchner funnel and the product was washed with EtOAc (3×2 L). The bright white solid was air dried in pans for 24 h then further dried in a vacuum oven (50° C., 0.1 mm Hg, 24 h) to afford 1649 g of a white crystalline solid (mp 115.5-116.5° C.).

[0170] The brine layer in the 20 L continuous extractor was further extracted for 72 h with recycled chloroform. The chloroform was concentrated to 120 g of oil and this was combined with the mother liquor from the above filtration (225 g), dissolved in brine (250 mL) and extracted once with chloroform (250 mL). The brine solution was continuously extracted and the product was crystallized as described above to afford an additional 178 g of crystalline product containing about 2% of thymine. The combined yield was 1827 g (69.4%). HPLC indicated about 99.5% purity with the balance being the dimer.

[0171] Preparation of 5′-O-DMT-2′-O-(2-methoxyethyl)-5-methyluridine Penultimate Intermediate

[0172] In a 50 L glass-lined steel reactor, 2′-O-(2-methoxyethyl)-5-methyl-uridine (MOE-T, 1500 g, 4.738 mol), lutidine (1015 g, 9.476 mol) were dissolved in anhydrous acetonitrile (15 L). The solution was stirred rapidly and chilled to −10° C. (internal temperature). Dimethoxytriphenylmethyl chloride (1765.7 g, 5.21 mol) was added as a solid in one portion. The reaction was allowed to warm to −2° C. over 1 h. (Note: The reaction was monitored closely by TLC (EtOAc) to determine when to stop the reaction so as to not generate the undesired bis-DMT substituted side product). The reaction was allowed to warm from −2 to 3° C. over 25 min. then quenched by adding MeOH (300 mL) followed after 10 min by toluene (16 L) and water (16 L). The solution was transferred to a clear 50 L vessel with a bottom outlet, vigorously stirred for 1 minute, and the layers separated. The aqueous layer was removed and the organic layer was washed successively with 10% aqueous citric acid (8 L) and water (12 L). The product was then extracted into the aqueous phase by washing the toluene solution with aqueous sodium hydroxide (0.5N, 16 L and 8 L). The combined aqueous layer was overlayed with toluene (12 L) and solid citric acid (8 moles, 1270 g) was added with vigorous stirring to lower the pH of the aqueous layer to 5.5 and extract the product into the toluene. The organic layer was washed with water (10 L) and TLC of the organic layer indicated a trace of DMT-O-Me, bis DMT and dimer DMT.

[0173] The toluene solution was applied to a silica gel column (6 L sintered glass funnel containing approx. 2 kg of silica gel slurried with toluene (2 L) and TEA(25 mL)) and the fractions were eluted with toluene (12 L) and EtOAc (3×4 L) using vacuum applied to a filter flask placed below the column. The first EtOAc fraction containing both the desired product and impurities were resubjected to column chromatography as above. The clean fractions were combined, rotary evaporated to a foam, coevaporated with acetonitrile (6 L) and dried in a vacuum oven (0.1 mm Hg, 40 h, 40° C.) to afford 2850 g of a white crisp foam. NMR spectroscopy indicated a 0.25 mole % remainder of acetonitrile (calculates to be approx. 47 g) to give a true dry weight of 2803 g (96%). HPLC indicated that the product was 99.41% pure, with the remainder being 0.06 DMT-O-Me, 0.10 unknown, 0.44 bis DMT, and no detectable dimer DMT or 3′-O-DMT.

[0174] Preparation of [5′-O-(4,4′-Dimethoxytriphenylmethyl)-2′-O-(2-methoxyethyl)-5-methyluridin-3′-O-yl]-2-cyanoethyl-N,N-diisopropylphosphoramidite (MOE T Amidite)

[0175] 5′-O-(4,4′-Dimethoxytriphenylmethyl)-2′-O-(2-methoxyethyl)-5-methyluridine (1237 g, 2.0 mol) was dissolved in anhydrous DMF (2.5 L). The solution was co-evaporated with toluene (200 ml) at 50° C. under reduced pressure, then cooled to room temperature and 2-cyanoethyl tetraisopropylphosphorodiamidite (900 g, 3.0 mol) and tetrazole (70 g, 1.0 mol) were added. The mixture was shaken until all tetrazole was dissolved, N-methylimidazole (20 ml) was added and the solution was left at room temperature for 5 hours. TEA (300 ml) was added, the mixture was diluted with DMF (3.5 L) and water (600 ml) and extracted with hexane (3×3L). The mixture was diluted with water (1.6 L) and extracted with the mixture of toluene (12 L) and hexanes (9 L). The upper layer was washed with DMF-water (7:3 v/v, 3×3 L) and water (3×3 L). The organic layer was dried (Na₂SO₄), filtered and evaporated. The residue was co-evaporated with acetonitrile (2×2 L) under reduced pressure and dried in a vacuum oven (25° C., 0.1 mm Hg, 40 h) to afford 1526 g of an off-white foamy solid (95%).

[0176] Preparation of 5′-O-Dimethoxytrityl-2′-O-(2-methoxyethyl)-5-methylcytidine Intermediate

[0177] To a 50 L Schott glass-lined steel reactor equipped with an electric stirrer, reagent addition pump (connected to an addition funnel), heating/cooling system, internal thermometer and argon gas line was added 5′-O-dimethoxytrityl-2′-O-(2-methoxyethyl)-5-methyl-uridine (2.616 kg, 4.23 mol, purified by base extraction only and no scrub column), anhydrous acetonitrile (20 L), and TEA (9.5 L, 67.7 mol, 16 eq). The mixture was chilled with stirring to −10° C. internal temperature (external −20° C.). Trimethylsilylchloride (1.60 L, 12.7 mol, 3.0 eq) was added over 30 min. while maintaining the internal temperature below −5° C., followed by a wash of anhydrous acetonitrile (1 L). (Note: the reaction is mildly exothermic and copious hydrochloric acid fumes form over the course of the addition). The reaction was allowed to warm to 0° C. and the reaction progress was confirmed by TLC (EtOAc, R_{f} 0.68 and 0.87 for starting material and silyl product, respectively). Upon completion, triazole (2.34 kg, 33.8 mol, 8.0 eq) was added the reaction was cooled to −20° C. internal temperature (external −30° C.). Phosphorous oxychloride (793 mL, 8.51 mol, 2.01 eq) was added slowly over 60 min so as to maintain the temperature between −20° C. and −10° C. (note: strongly exothermic), followed by a wash of anhydrous acetonitrile (1 L). The reaction was warmed to 0° C. and stirred for 1 h, at which point it was an off-white thick suspension. TLC indicated a complete conversion to the triazole product (EtOAc, R_{f} 0.87 to 0.75 with the product spot glowing in long wavelength UV light). The reaction was cooled to −15° C. and water (5 L) was slowly added at a rate to maintain the temperature below +10° C. in order to quench the reaction and to form a homogenous solution. (Caution: this reaction is initially very strongly exothermic). Approximately one-half of the reaction volume (22 L) was transferred by air pump to another vessel, diluted with EtOAc (12 L) and extracted with water (2×8 L). The second half of the reaction was treated in the same way. The combined aqueous layers were back-extracted with EtOAc (8 L) The organic layers were combined and concentrated in a 20 L rotary evaporator to an oily foam. The foam was coevaporated with anhydrous acetonitrile (4 L) to remove EtOAc. (note: dioxane may be used instead of anhydrous acetonitrile if dried to a hard foam). The residue was dissolved in dioxane (2 L) and concentrated ammonium hydroxide (750 mL) was added. A homogenous solution formed in a few minutes and the reaction was allowed to stand overnight

[0178] TLC indicated a complete reaction (CH₂Cl₂-acetone-MeOH, 20:5:3, R_{f} 0.51). The reaction solution was concentrated on a rotary evaporator to a dense foam and slowly redissolved in warm CH₂Cl₂ (4 L, 40° C.) and transferred to a 20 L glass extraction vessel equipped with a air-powered stirrer. The organic layer was extracted with water (2×6 L) to remove the triazole by-product. (Note: In the first extraction an emulsion formed which took about 2 h to resolve). The water layer was back-extracted with CH₂Cl₂ (2×2 L), which in turn was washed with water (3 L). The combined organic layer was concentrated in 2×20 L flasks to a gum and then recrystallized from EtOAc seeded with crystalline product. After sitting overnight, the first crop was collected on a 25 cm Coors Buchner funnel and washed repeatedly with EtOAc until a white free-flowing powder was left (about 3×3 L). The filtrate was concentrated to an oil recrystallized from EtOAc, and collected as above. The solid was air-dried in pans for 48 h, then further dried in a vacuum oven (50° C., 0.1 mm Hg, 17 h) to afford 2248 g of a bright white, dense solid (86%). An HPLC analysis indicated both crops to be 99.4% pure and NMR spectroscopy indicated only a faint trace of EtOAc remained.

[0179] Preparation of 5′-O-dimethoxytrityl-2′-O-(2-methoxyethyl)-N-4-benzoyl-5-methyl-cytidine Penultimate Intermediate:

[0180] Crystalline 5′-O-dimethoxytrityl-2′-O-(2-methoxyethyl)-5-methyl-cytidine (1000 g, 1.62 mol) was suspended in anhydrous DMF (3 kg) at ambient temperature and stirred under an Ar atmosphere. Benzoic anhydride (439.3 g, 1.94 mol) was added in one portion. The solution clarified after 5 hours and was stirred for 16 h. HPLC indicated 0.45% starting material remained (as well as 0.32% N4, 3′-O-bis Benzoyl). An additional amount of benzoic anhydride (6.0 g, 0.0265 mol) was added and after 17 h, HPLC indicated no starting material was present. TEA (450 mL, 3.24 mol) and toluene (6 L) were added with stirring for 1 minute. The solution was washed with water (4×4 L), and brine (2×4 L). The organic layer was partially evaporated on a 20 L rotary evaporator to remove 4 L of toluene and traces of water. HPLC indicated that the bis benzoyl side product was present as a 6% impurity. The residue was diluted with toluene (7 L) and anhydrous DMSO (200 mL, 2.82 mol) and sodium hydride (60% in oil, 70 g, 1.75 mol) was added in one portion with stirring at ambient temperature over 1 h. The reaction was quenched by slowly adding then washing with aqueous citric acid (10%, 100 mL over 10 min, then 2×4 L), followed by aqueous sodium bicarbonate (2%, 2 L), water (2×4 L) and brine (4 L). The organic layer was concentrated on a 20 L rotary evaporator to about 2 L total volume. The residue was purified by silica gel column chromatography (6 L Buchner funnel containing 1.5 kg of silica gel wetted with a solution of EtOAc-hexanes-TEA(70:29:1)). The product was eluted with the same solvent (30 L) followed by straight EtOAc (6 L). The fractions containing the product were combined, concentrated on a rotary evaporator to a foam and then dried in a vacuum oven (50° C., 0.2 mm Hg, 8 h) to afford 1155 g of a crisp, white foam (98%). HPLC indicated a purity of >99.7%.

[0181] Preparation of [5′-O-(4,4′-Dimethoxytriphenylmethyl)-2′-O-(2-methoxyethyl)-N⁴-benzoyl-5-methylcytidin-3′-O-yl]-2-cyanoethyl-N,N-diisopropylphosphoramidite (MOE 5-Me-C Amidite)

[0182] 5′-O-(4,4′-Dimethoxytriphenylmethyl)-2′-O-(2-methoxyethyl)-N⁴-benzoyl-5-methylcytidine (1082 g, 1.5 mol) was dissolved in anhydrous DMF (2 L) and co-evaporated with toluene (300 ml) at 50° C. under reduced pressure. The mixture was cooled to room temperature and 2-cyanoethyl tetraisopropylphosphorodiamidite (680 g, 2.26 mol) and tetrazole (52.5 g, 0.75 mol) were added. The mixture was shaken until all tetrazole was dissolved, N-methylimidazole (30 ml) was added, and the mixture was left at room temperature for 5 hours. TEA (300 ml) was added, the mixture was diluted with DMF (1 L) and water (400 ml) and extracted with hexane (3×3 L). The mixture was diluted with water (1.2 L) and extracted with a mixture of toluene (9 L) and hexanes (6 L). The two layers were separated and the upper layer was washed with DMF-water (60:40 v/v, 3×3 L) and water (3×2 L). The organic layer was dried (Na₂SO₄), filtered and evaporated. The residue was co-evaporated with acetonitrile (2×2 L) under reduced pressure and dried in a vacuum oven (25° C., 0.1 mm Hg, 40 h) to afford 1336 g of an off-white foam (97%).

[0183] Preparation of [5′-O-(4,4′-Dimethoxytriphenylmethyl)-2′-O-(2-methoxyethyl)-N⁶-benzoyladenosin-3′-O-yl]-2-cyanoethyl-N,N-diisopropylphosphoramidite (MOE A Amdite)

[0184] 5′-O-(4,4′-Dimethoxytriphenylmethyl)-2′-O-(2-methoxyethyl)-N⁶-benzoyladenosine (purchased from Reliable Biopharmaceutical, St. Lois, Mo.), 1098 g, 1.5 mol) was dissolved in anhydrous DMF (3 L) and co-evaporated with toluene (300 ml) at 50° C. The mixture was cooled to room temperature and 2-cyanoethyl tetraisopropylphosphorodiamidite (680 g, 2.26 mol) and tetrazole (78.8 g, 1.24 mol) were added. The mixture was shaken until all tetrazole was dissolved, N-methylimidazole (30 ml) was added, and mixture was left at room temperature for 5 hours. TEA (300 ml) was added, the mixture was diluted with DMF (1 L) and water (400 ml) and extracted with hexanes (3×3 L). The mixture was diluted with water (1.4 L) and extracted with the mixture of toluene (9 L) and hexanes (6 L). The two layers were separated and the upper layer was washed with DMF-water (60:40, v/v, 3×3 L) and water (3×2 L). The organic layer was dried (Na₂SO₄), filtered and evaporated to a sticky foam. The residue was co-evaporated with acetonitrile (2.5 L) under reduced pressure and dried in a vacuum oven (25° C., 0.1 mm Hg, 40 h) to afford 1350 g of an off-white foam solid (96%).

[0185] Prepartion of [5′-O-(4,4′-Dimethoxytriphenylmethyl)-2′-O-(2-methoxyethyl)-N⁴-isobutyrylguanosin-3′-O-yl]-2-cyanoethyl-N,N-diisopropylphosphoramidite (MOE G Amidite)

[0186] 5′-O-(4,4′-Dimethoxytriphenylmethyl)-2′-O-(2-methoxyethyl)-N⁴-isobutyrlguanosine (purchased from Reliable Biopharmaceutical, St. Louis, Mo., 1426 g, 2.0 mol) was dissolved in anhydrous DMF (2 L). The solution was co-evaporated with toluene (200 ml) at 50° C., cooled to room temperature and 2-cyanoethyl tetraisopropylphosphorodiamidite (900 g, 3.0 mol) and tetrazole (68 g, 0.97 mol) were added. The mixture was shaken until all tetrazole was dissolved, N-methylimidazole (30 ml) was added, and the mixture was left at room temperature for 5 hours. TEA (300 ml) was added, the mixture was diluted with DMF (2 L) and water (600 ml) and extracted with hexanes (3×3 L). The mixture was diluted with water (2 L) and extracted with a mixture of toluene (10 L) and hexanes (5 L). The two layers were separated and the upper layer was washed with DMF-water (60:40, v/v, 3×3 L). EtOAc (4 L) was added and the solution was washed with water (3×4 L). The organic layer was dried (Na₂SO₄), filtered and evaporated to approx. 4 kg. Hexane (4 L) was added, the mixture was shaken for 10 min, and the supernatant liquid was decanted. The residue was co-evaporated with acetonitrile (2×2 L) under reduced pressure and dried in a vacuum oven (25° C., 0.1 mm Hg, 40 h) to afford 1660 g of an off-white foamy solid (91%).

[0187] 2′-O-(Aminooxyethyl) nucleoside amidites and 2′-O-(dimethylaminooxyethyl) Nucleoside Amidites

[0188] 2′-(Dimethylaminooxyethoxy) Nucleoside Amidites

[0189] 2′-(Dimethylaminooxyethoxy) nucleoside amidites (also known in the art as 2′-O-(dimethylaminooxyethyl) nucleoside amidites) are prepared as described in the following paragraphs. Adenosine, cytidine and guanosine nucleoside amidites are prepared similarly to the thymidine (5-methyluridine) except the exocyclic amines are protected with a benzoyl moiety in the case of adenosine and cytidine and with isobutyryl in the case of guanosine.

[0190] 5′-O-tert-Butyldiphenylsilyl-O²-2′-anhydro-5-methyluridine

[0191] O²-2′-anhydro-5-methyluridine (Pro. Bio. Sint., Varese, Italy, 100.0 g, 0.416 mmol), dimethylaminopyridine (0.66 g, 0.013 eq, 0.0054 mmol) were dissolved in dry pyridine (500 ml) at ambient temperature under an argon atmosphere and with mechanical stirring. tert-Butyldiphenylchlorosilane (125.8 g, 119.0 mL, 1.1 eq, 0.458 mmol) was added in one portion. The reaction was stirred for 16 h at ambient temperature. TLC (R_{f} 0.22, EtOAc) indicated a complete reaction. The solution was concentrated under reduced pressure to a thick oil. This was partitioned between CH₂Cl₂ (1 L) and saturated sodium bicarbonate (2×1 L) and brine (1 L). The organic layer was dried over sodium sulfate, filtered, and concentrated under reduced pressure to a thick oil. The oil was dissolved in a 1:1 mixture of EtOAc and ethyl ether (600 mL) and cooling the solution to −10° C. afforded a white crystalline solid which was collected by filtration, washed with ethyl ether (3×200 mL) and dried (40° C., 1 mm Hg, 24 h) to afford 149 g of white solid (74.8%). TLC and NMR spectroscopy were consistent with pure product.

[0192] 5′-O-tert-Butyldiphenylsilyl-2′-O-(2-hydroxyethyl)-5-methyluridine

[0193] In the fume hood, ethylene glycol (350 mL, excess) was added cautiously with manual stirring to a 2 L stainless steel pressure reactor containing borane in tetrahydrofuran (1.0 M, 2.0 eq, 622 mL). (Caution: evolves hydrogen gas). 5′-O-tert-Butyldiphenylsilyl-0²-2′-anhydro-5-methyluridine (149 g, 0.311 mol) and sodium bicarbonate (0.074 g, 0.003 eq) were added with manual stirring. The reactor was sealed and heated in an oil bath until an internal temperature of 160° C. was reached and then maintained for 16 h (pressure <100 psig). The reaction vessel was cooled to ambient temperature and opened. TLC (EtOAc, R_{f} 0.67 for desired product and R_{f} 0.82 for ara-T side product) indicated about 70% conversion to the product. The solution was concentrated under reduced pressure (10 to 1 mm Hg) in a warm water bath (40-100° C.) with the more extreme conditions used to remove the ethylene glycol. (Alternatively, once the THF has evaporated the solution can be diluted with water and the product extracted into EtOAc). The residue was purified by column chromatography (2 kg silica gel, EtOAc-hexanes gradient 1:1 to 4:1). The appropriate fractions were combined, evaporated and dried to afford 84 g of a white crisp foam (50%), contaminated starting material (17.4 g, 12% recovery) and pure reusable starting material (20 g, 13% recovery). TLC and NMR spectroscopy were consistent with 99% pure product.

[0194] 2′-O-([2-phthalimidoxy)ethyl]-5′-t-butyldiphenylsilyl-5-methyluridine

[0195] 5′-O-tert-Butyldiphenylsilyl-2′-O-(2-hydroxyethyl)-5-methyluridine (20 g, 36.98 mmol) was mixed with triphenylphosphine (11.63 g, 44.36 mmol) and N-hydroxyphthalimide (7.24 g, 44.36 mmol) and dried over P₂O₅ under high vacuum for two days at 40° C. The reaction mixture was flushed with argon and dissolved in dry THF (369.8 mL, Aldrich, sure seal bottle). Diethyl-azodicarboxylate (6.98 mL, 44.36 mmol) was added dropwise to the reaction mixture with the rate of addition maintained such that the resulting deep red coloration is just discharged before adding the next drop. The reaction mixture was stirred for 4 hrs., after which time TLC (EtOAc:hexane, 60:40) indicated that the reaction was complete. The solvent was evaporated in vacuuo and the residue purified by flash column chromatography (eluted with 60:40 EtOAc:hexane), to yield 2′-O-([2-phthalimidoxy)ethyl]-5′-t-butyldiphenylsilyl-5-methyluridine as white foam (21.819 g, 86%) upon rotary evaporation.

[0196] 5′-O-tert-butyldiphenylsilyl-2′-O-[(2-formadoximinooxy)ethyl]-5-methyluridine

[0197] 2′-O-([2-phthalimidoxy)ethyl]-5′-t-butyldiphenylsilyl-5-methyluridine (3.1 g, 4.5 mmol) was dissolved in dry CH₂Cl₂ (4.5 mL) and methylhydrazine (300 mL, 4.64 mmol) was added dropwise at −10° C. to 0° C. After 1 h the mixture was filtered, the filtrate washed with ice cold CH₂Cl₂, and the combined organic phase was washed with water and brine and dried (anhydrous Na₂SO₄). The solution was filtered and evaporated to afford 2′-O-(aminooxyethyl) thymidine, which was then dissolved in MeOH (67.5 mL). Formaldehyde (20% aqueous solution, w/w, 1.1 eq.) was added and the resulting mixture was stirred for 1 h. The solvent was removed under vacuum and the residue was purified by column chromatography to yield 5′-O-tert-butyldiphenylsilyl-2′-O-[(2-formadoximinooxy) ethyl]-5-methyluridine as white foam (1.95 g, 78%) upon rotary evaporation.

[0198] 5′-O-tert-Butyldiphenylsilyl-2′-O-[N,N dimethylaminooxyethyl]-5-methyluridine

[0199] 5′-O-tert-butyldiphenylsilyl-2′-O-[(2-formadoximinooxy)ethyl]-5-methyluridine (1.77 g, 3.12 mmol) was dissolved in a solution of 1M pyridinium p-toluenesulfonate (PPTS) in dry MeOH (30.6 mL) and cooled to 10° C. under inert atmosphere. Sodium cyanoborohydride (0.39 g, 6.13 mmol) was added and the reaction mixture was stirred. After 10 minutes the reaction was warmed to room temperature and stirred for 2 h. while the progress of the reaction was monitored by TLC (5% MeOH in CH₂Cl₂). Aqueous NaHCO₃ solution (5%, 10 mL) was added and the product was extracted with EtOAc (2×20 mL). The organic phase was dried over anhydrous Na₂SO₄, filtered, and evaporated to dryness. This entire procedure was repeated with the resulting residue, with the exception that formaldehyde (20% w/w, 30 mL, 3.37 mol) was added upon dissolution of the residue in the PPTS/MeOH solution. After the extraction and evaporation, the residue was purified by flash column chromatography and (eluted with 5% MeOH in CH₂Cl₂) to afford 5′-O-tert-butyldiphenylsilyl-2′-O-[N,N-dimethylaminooxyethyl]-5-methyluridine as a white foam (14.6 g, 80%) upon rotary evaporation.

[0200] 2′-O-(dimethylaminooxyethyl)-5-methyluridine

[0201] Triethylamine trihydrofluoride (3.91 mL, 24.0 mmol) was dissolved in dry THF and TEA (1.67 mL, 12 mmol, dry, stored over KOH) and added to 5′-O-tert-butyldiphenylsilyl-2′-O-[N,N-dimethylaminooxyethyl]-5-methyluridine (1.40 g, 2.4 mmol). The reaction was stirred at room temperature for 24 hrs and monitored by TLC (5% MeOH in CH₂Cl₂). The solvent was removed under vacuum and the residue purified by flash column chromatography (eluted with 10% MeOH in CH₂Cl₂) to afford 2′-O-(dimethylaminooxyethyl)-5-methyluridine (766 mg, 92.5%) upon rotary evaporation of the solvent.

[0202] 5′-O-DMT-2′-O-(dimethylaminooxyethyl)-5-methyluridine

[0203] 2′-O-(dimethylaminooxyethyl)-5-methyluridine (750 mg, 2.17 mmol) was dried over P₂O₅ under high vacuum overnight at 40° C., co-evaporated with anhydrous pyridine (20 mL), and dissolved in pyridine (11 mL) under argon atmosphere. 4-dimethylaminopyridine (26.5 mg, 2.60 mmol) and 4,4′-dimethoxytrityl chloride (880 mg, 2.60 mmol) were added to the pyridine solution and the reaction mixture was stirred at room temperature until all of the starting material had reacted. Pyridine was removed under vacuum and the residue was purified by column chromatography (eluted with 10% MeOH in CH₂Cl₂ containing a few drops of pyridine) to yield 5′-O-DMT-2′-O-(dimethylamino-oxyethyl)-5-methyluridine (1.13 g, 80%) upon rotary evaporation.

[0204] 5′-O-DMT-2′-O-(2-N,N-dimethylaminooxyethyl)-5-methyluridine-3′-[(2-cyanoethyl)-N,N-diisopropylphosphoramidite]

[0205] 5′-O-DMT-2′-O-(dimethylaminooxyethyl)-5-methyluridine (1.08 g, 1.67 mmol) was co-evaporated with toluene (20 mL), N,N-diisopropylamine tetrazonide (0.29 g, 1.67 mmol) was added and the mixture was dried over P₂O₅ under high vacuum overnight at 40° C. This was dissolved in anhydrous acetonitrile (8.4 mL) and 2-cyanoethyl-N,N,N¹,N¹-tetraisopropylphosphoramidite (2.12 mL, 6.08 mmol) was added. The reaction mixture was stirred at ambient temperature for 4 h under inert atmosphere. The progress of the reaction was monitored by TLC (hexane:EtOAc 1:1). The solvent was evaporated, then the residue was dissolved in EtOAc (70 mL) and washed with 5% aqueous NaHCO₃ (40 mL). The EtOAc layer was dried over anhydrous Na₂SO₄, filtered, and concentrated. The residue obtained was purified by column chromatography (EtOAc as eluent) to afford 5′-O-DMT-2′-O-(2-N,N-dimethylaminooxyethyl)-5-methyluridine-3′-[(2-cyanoethyl)-N,N-diisopropylphosphoramidite] as a foam (1.04 g, 74.9%) upon rotary evaporation.

[0206] 2′-(Aminooxyethoxy) Nucleoside Amidites

[0207] 2′-(Aminooxyethoxy) nucleoside amidites (also known in the art as 2′-O-(aminooxyethyl) nucleoside amidites) are prepared as described in the following paragraphs. Adenosine, cytidine and thymidine nucleoside amidites are prepared similarly.

[0208] N2-isobutyryl-6-O-diphenylcarbamoyl-2′-O-(2-ethylacetyl)-5′-O-(4,4′-dimethoxytrityl)guanosine-3′-[(2-cyanoethyl)-N,N-diisopropylphosphoramidite]

[0209] The 2′-O-aminooxyethyl guanosine analog may be obtained by selective 2′-O-alkylation of diaminopurine riboside. Multigram quantities of diaminopurine riboside may be purchased from Schering AG (Berlin) to provide 2′-O-(2-ethylacetyl) diaminopurine riboside along with a minor amount of the 3′-O-isomer. 2′-O-(2-ethylacetyl) diaminopurine riboside may be resolved and converted to 2′-O-(2-ethylacetyl)guanosine by treatment with adenosine deaminase. (McGee, D. P. C., Cook, P. D., Guinosso, C. J., WO 94/02501 A1940203.) Standard protection procedures should afford 2′-O-(2-ethylacetyl)-5′-O-(4,4′-dimethoxytrityl)guanosine and 2-N-isobutyryl-6-O-diphenylcarbamoyl-2′-O-(2-ethylacetyl)-5′-O-(4,4′-dimethoxytrityl)guanosine which may be reduced to provide 2-N-isobutyryl-6-O-diphenylcarbamoyl-2′-O-(2-hydroxyethyl)-5′-O-(4,4′-dimethoxytrityl)guanosine. As before the hydroxyl group may be displaced by N-hydroxyphthalimide via a Mitsunobu reaction, and the protected nucleoside may be phosphitylated as usual to yield 2-N-isobutyryl-6-O-diphenylcarbamoyl-2′-O-([2-phthalmidoxy]ethyl)-5′-O-(4,41-dimethoxytrityl)guanosine-3′-[(2-cyanoethyl)-N,N-diisopropylphosphoramidite].

[0210] 2′-dimethylaminoethoxyethoxy (2′-DMAEOE) Nucleoside Amidites

[0211] 2′-dimethylaminoethoxyethoxy nucleoside amidites (also known in the art as 2′-O-dimethylaminoethoxyethyl, i.e., 2′-O—CH₂—O—CH₂—N(CH₂)₂, or 2′-DMAEOE nucleoside amidites) are prepared as follows. Other nucleoside amidites are prepared similarly.

[0212] 2′-O-[2(2-N,N-dimethylaminoethoxy)ethyl]-5-methyl Uridine

[0213] 2[2-(Dimethylamino)ethoxy]ethanol (Aldrich, 6.66 g, 50 mmol) was slowly added to a solution of borane in tetrahydrofuran (1 M, 10 mL, 10 mmol) with stirring in a 100 mL bomb. (Caution: Hydrogen gas evolves as the solid dissolves). O²-,2′-anhydro-5-methyluridine (1.2 g, 5 mmol), and sodium bicarbonate (2.5 mg) were added and the bomb was sealed, placed in an oil bath and heated to 155° C. for 26 h. then cooled to room temperature. The crude solution was concentrated, the residue was diluted with water (200 mL) and extracted with hexanes (200 mL). The product was extracted from the aqueous layer with EtOAc (3×200 mL) and the combined organic layers were washed once with water, dried over anhydrous sodium sulfate, filtered and concentrated. The residue was purified by silica gel column chromatography (eluted with 5:100:2 MeOH/CH₂Cl₂/TEA) as the eluent. The appropriate fractions were combined and evaporated to afford the product as a white solid.

[0214] 5′-O-dimethoxytrityl-2′-O-[2(2-N,N-dimethylaminoethoxy) ethyl)]-5-methyl Uridine

[0215] To 0.5 g (1.3 mmol) of 2′-O-[2(2-N,N-dimethylaminoethoxy)ethyl)]-5-methyl uridine in anhydrous pyridine (8 mL), was added TEA (0.36 mL) and dimethoxytrityl chloride (DMT-Cl, 0.87 g, 2 eq.) and the reaction was stirred for 1 h. The reaction mixture was poured into water (200 mL) and extracted with CH₂Cl₂ (2×200 mL). The combined CH₂Cl₂ layers were washed with saturated NaHCO₃ solution, followed by saturated NaCl solution, dried over anhydrous sodium sulfate, filtered and evaporated. The residue was purified by silica gel column chromatography (eluted with 5:100:1 MeOH/CH₂Cl₂/TEA) to afford the product.

[0216] 5′-O-Dimethoxytrityl-2′-O-[2(2-N,N-dimethylaminoethoxy)-ethyl)]-5-methyl uridine-3′-O-(cyanoethyl-N,N-diisopropyl)phosphoramidite

[0217] Diisopropylaminotetrazolide (0.6 g) and 2-cyanoethoxy-N,N-diisopropyl phosphoramidite (1.1 mL, 2 eq.) were added to a solution of 5′-O-dimethoxytrityl-2′-O-[2(2-N,N-dimethylaminoethoxy)ethyl)]-5-methyluridine (2.17 g, 3 mmol) dissolved in CH₂Cl₂ (20 mL) under an atmosphere of argon. The reaction mixture was stirred overnight and the solvent evaporated. The resulting residue was purified by silica gel column chromatography with EtOAc as the eluent to afford the title compound.

### Example 2

[0218] Oligonucleotide Synthesis

[0219] Unsubstituted and substituted phosphodiester (P═O) oligonucleotides are synthesized on an automated DNA synthesizer (Applied Biosystems model 394) using standard phosphoramidite chemistry with oxidation by iodine.

[0220] Phosphorothioates (P═S) are synthesized similar to phosphodiester oligonucleotides with the following exceptions: thiation was effected by utilizing a 10% w/v solution of 3H-1,2-benzodithiole-3-one 1,1-dioxide in acetonitrile for the oxidation of the phosphite linkages. The thiation reaction step time was increased to 180 sec and preceded by the normal capping step. After cleavage from the CPG column and deblocking in concentrated ammonium hydroxide at 55° C. (12-16 hr), the oligonucleotides were recovered by precipitating with >3 volumes of ethanol from a 1 M NH₄oAc solution. Phosphinate oligonucleotides are prepared as described in U.S. Pat. No. 5,508,270, herein incorporated by reference.

[0221] Alkyl phosphonate oligonucleotides are prepared as described in U.S. Pat. No. 4,469,863, herein incorporated by reference.

[0222] 3′-Deoxy-3′-methylene phosphonate oligonucleotides are prepared as described in U.S. Pat. Nos. 5,610,289 or 5,625,050, herein incorporated by reference.

[0223] Phosphoramidite oligonucleotides are prepared as described in U.S. Pat. No. 5,256,775 or U.S. Pat. No. 5,366,878, herein incorporated by reference.

[0224] Alkylphosphonothioate oligonucleotides are prepared as described in published PCT applications PCT/US94/00902 and PCT/US93/06976 (published as WO 94/17093 and WO 94/02499, respectively), herein incorporated by reference.

[0225] 3′-Deoxy-3′-amino phosphoramidate oligonucleotides are prepared as described in U.S. Pat. No. 5,476,925, herein incorporated by reference.

[0226] Phosphotriester oligonucleotides are prepared as described in U.S. Pat. No. 5,023,243, herein incorporated by reference.

[0227] Borano phosphate oligonucleotides are prepared as described in U.S. Pat. Nos. 5,130,302 and 5,177,198, both herein incorporated by reference.

### Example 3

[0228] Oligonucleoside Synthesis

[0229] Methylenemethylimino linked oligonucleosides, also identified as MMI linked oligonucleosides, methylenedimethylhydrazo linked oligonucleosides, also identified as MDH linked oligonucleosides, and methylenecarbonylamino linked oligonucleosides, also identified as amide-3 linked oligonucleosides, and methyleneaminocarbonyl linked oligonucleosides, also identified as amide-4 linked oligonucleosides, as well as mixed backbone compounds having, for instance, alternating MMI and P═O or P═S linkages are prepared as described in U.S. Pat. Nos. 5,378,825, 5,386,023, 5,489,677, 5,602,240 and 5,610,289, all of which are herein incorporated by reference.

[0230] Formacetal and thioformacetal linked oligonucleosides are prepared as described in U.S. Pat. Nos. 5,264,562 and 5,264,564, herein incorporated by reference.

[0231] Ethylene oxide linked oligonucleosides are prepared as described in U.S. Pat. No. 5,223,618, herein incorporated by reference.

### Example 4

[0232] PNA Synthesis

[0233] Peptide nucleic acids (PNAs) are prepared in accordance with any of the various procedures referred to in Peptide Nucleic Acids (PNA): Synthesis, Properties and Potential Applications, Bioorganic & Medicinal Chemistry, 1996, 4, 5-23. They may also be prepared in accordance with U.S. Pat. Nos. 5,539,082, 5,700,922, and 5,719,262, herein incorporated by reference.

### Example 5

[0234] Synthesis of Chimeric Oligonucleotides

[0235] Chimeric oligonucleotides, oligonucleosides or mixed oligonucleotides/oligonucleosides of the invention can be of several different types. These include a first type wherein the “gap” segment of linked nucleosides is positioned between 5′ and 3′ “wing” segments of linked nucleosides and a second “open end” type wherein the “gap” segment is located at either the 3′ or the 5′ terminus of the oligomeric compound. Oligonucleotides of the first type are also known in the art as “gapmers” or gapped oligonucleotides. Oligonucleotides of the second type are also known in the art as “hemimers” or “wingmers”.

[0236] [2′-O-Me]-[2′-deoxyl-[2′-O-Me] Chimeric Phosphorothioate Oligonucleotides

[0237] Chimeric oligonucleotides having 2′-O-alkyl phosphorothioate and 2′-deoxy phosphorothioate oligonucleotide segments are synthesized using an Applied Biosystems automated DNA synthesizer Model 394, as above. Oligonucleotides are synthesized using the automated synthesizer and 2′-deoxy-5′-dimethoxytrityl-3′-O-phosphoramidite for the DNA portion and 5′-dimethoxytrityl-2′-O-methyl-3′-O-phosphoramidite for 5′ and 3′ wings. The standard synthesis cycle is modified by incorporating coupling steps with increased reaction times for the 5′-dimethoxytrityl-2′-O-methyl-3′-O-phosphoramidite. The fully protected oligonucleotide is cleaved from the support and deprotected in concentrated ammonia (NH₄OH) for 12-16 hr at 55° C. The deprotected oligo is then recovered by an appropriate method (precipitation, column chromatography, volume reduced in vacuo and analyzed spetrophotometrically for yield and for purity by capillary electrophoresis and by mass spectrometry.

[0238] [2′-O-(2-Methoxyethyl)]-[2′-deoxy]-[2′-O-(Methoxyethyl)] Chimeric Phosphorothioate Oligonucleotides

[0239] [2′-O-(2-methoxyethyl)]-[2′-deoxy]-[-2′-O-(methoxyethyl)] chimeric phosphorothioate oligonucleotides were prepared as per the procedure above for the 2′-O-methyl chimeric oligonucleotide, with the substitution of 2′-O-(methoxyethyl) amidites for the 2′-O-methyl amidites.

[0240] [2′-O-(2-Methoxyethyl)Phosphodiester]-[2′-deoxy Phosphorothioate]-[2′-O-(2-Methoxyethyl) Phosphodiester] Chimeric Oligonucleotides

[0241] [2′-O-(2-methoxyethyl phosphodiester]-[2′-deoxy phosphorothioate]-[2′-O-(methoxyethyl) phosphodiester] chimeric oligonucleotides are prepared as per the above procedure for the 2′-O-methyl chimeric oligonucleotide with the substitution of 2′-O-(methoxyethyl) amidites for the 2′-O-methyl amidites, oxidation with iodine to generate the phosphodiester internucleotide linkages within the wing portions of the chimeric structures and sulfurization utilizing 3,H-1,2 benzodithiole-3-one 1,1 dioxide (Beaucage Reagent) to generate the phosphorothioate internucleotide linkages for the center gap.

[0242] Other chimeric oligonucleotides, chimeric oligonucleosides and mixed chimeric oligonucleotides/oligonucleosides are synthesized according to U.S. Pat. No. 5,623,065, herein incorporated by reference.

### Example 6

[0243] Oligonucleotide Isolation

[0244] After cleavage from the controlled pore glass solid support and deblocking in concentrated ammonium hydroxide at 55° C. for 12-16 hours, the oligonucleotides or oligonucleosides are recovered by precipitation out of 1 M NH₄OAc with >3 volumes of ethanol. Synthesized oligonucleotides were analyzed by electrospray mass spectroscopy (molecular weight determination) and by capillary gel electrophoresis and judged to be at least 70% full length material. The relative amounts of phosphorothioate and phosphodiester linkages obtained in the synthesis was determined by the ratio of correct molecular weight relative to the −16 amu product (+/−32+/−48). For some studies oligonucleotides were purified by HPLC, as described by Chiang et al., J. Biol. Chem. 1991, 266, 18162-18171. Results obtained with HPLC-purified material were similar to those obtained with non-HPLC purified material.

### Example 7

[0245] Oligonucleotide Synthesis—96 Well Plate Format

[0246] Oligonucleotides were synthesized via solid phase P(III) phosphoramidite chemistry on an automated synthesizer capable of assembling 96 sequences simultaneously in a 96-well format. Phosphodiester internucleotide linkages were afforded by oxidation with aqueous iodine. Phosphorothioate internucleotide linkages were generated by sulfurization utilizing 3,H-1,2 benzodithiole-3-one 1,1 dioxide (Beaucage Reagent) in anhydrous acetonitrile. Standard base-protected beta-cyanoethyl-diiso-propyl phosphoramidites were purchased from commercial vendors (e.g. PE-Applied Biosystems, Foster City, Calif., or Pharmacia, Piscataway, N.J.). Non-standard nucleosides are synthesized as per standard or patented methods. They are utilized as base protected beta-cyanoethyldiisopropyl phosphoramidites.

[0247] Oligonucleotides were cleaved from support and deprotected with concentrated NH₄OH at elevated temperature (55-60° C.) for 12-16 hours and the released product then dried in vacuo. The dried product was then re-suspended in sterile water to afford a master plate from which all analytical and test plate samples are then diluted utilizing robotic pipettors.

### Example 8

[0248] Oligonucleotide Analysis—96-Well Plate Format

[0249] The concentration of oligonucleotide in each well was assessed by dilution of samples and UV absorption spectroscopy. The full-length integrity of the individual products was evaluated by capillary electrophoresis (CE) in either the 96-well format (Beckman P/ACE™ MDQ) or, for individually prepared samples, on a commercial CE apparatus (e.g., Beckman P/ACE™ 5000, ABI 270). Base and backbone composition was confirmed by mass analysis of the compounds utilizing electrospray-mass spectroscopy. All assay test plates were diluted from the master plate using single and multi-channel robotic pipettors. Plates were judged to be acceptable if at least 85% of the compounds on the plate were at least 85% full length.

### Example 9

[0250] Cell Culture and Oligonucleotide Treatment

[0251] The effect of antisense compounds on target nucleic acid expression can be tested in any of a variety of cell types provided that the target nucleic acid is present at measurable levels. This can be routinely determined using, for example, PCR or Northern blot analysis. The following cell types are provided for illustrative purposes, but other cell types can be routinely used, provided that the target is expressed in the cell type chosen. This can be readily determined by methods routine in the art, for example Northern blot analysis, ribonuclease protection assays, or RT-PCR.

[0252] T-24 Cells:

[0253] The human transitional cell bladder carcinoma cell line T-24 was obtained from the American Type Culture Collection (ATCC) (Manassas, Va.). T-24 cells were routinely cultured in complete McCoy's 5A basal media (Invitrogen Corporation, Carlsbad, Calif.) supplemented with 10% fetal calf serum (Invitrogen Corporation, Carlsbad, Calif.), penicillin 100 units per mL, and streptomycin 100 micrograms per mL (Invitrogen Corporation, Carlsbad, Calif.). Cells were routinely passaged by trypsinization and dilution when they reached 90% confluence. Cells were seeded into 96-well plates (Falcon-Primaria #3872) at a density of 7000 cells/well for use in RT-PCR analysis.

[0254] For Northern blotting or other analysis, cells may be seeded onto 100 mm or other standard tissue culture plates and treated similarly, using appropriate volumes of medium and oligonucleotide.

[0255] A549 Cells:

[0256] The human lung carcinoma cell line A549 was obtained from the American Type Culture Collection (ATCC) (Manassas, Va.). A549 cells were routinely cultured in DMEM basal media (Invitrogen Corporation, Carlsbad, Calif.) supplemented with 10% fetal calf serum (Invitrogen Corporation, Carlsbad, Calif.), penicillin 100 units per mL, and streptomycin 100 micrograms per mL (Invitrogen Corporation, Carlsbad, Calif.). Cells were routinely passaged by trypsinization and dilution when they reached 90% confluence.

[0257] NHDF Cells:

[0258] Human neonatal dermal fibroblast (NHDF) were obtained from the Clonetics Corporation (Walkersville, Md.). NHDFs were routinely maintained in Fibroblast Growth Medium (Clonetics Corporation, Walkersville, Md.) supplemented as recommended by the supplier. Cells were maintained for up to 10 passages as recommended by the supplier.

[0259] HEK Cells:

[0260] Human embryonic keratinocytes (HEK) were obtained from the Clonetics Corporation (Walkersville, Md.). HEKs were routinely maintained in Keratinocyte Growth Medium (Clonetics Corporation, Walkersville, Md.) formulated as recommended by the supplier. Cells were routinely maintained for up to 10 passages as recommended by the supplier.

[0261] b.END Cells:

[0262] The mouse brain endothelial cell line b.END was obtained from Dr. Werner Risau at the Max Plank Instititute (Bad Nauheim, Germany). b.END cells were routinely cultured in DMEM, high glucose (Gibco/Life Technologies, Gaithersburg, Md.) supplemented with 10% fetal calf serum (Gibco/Life Technologies, Gaithersburg, Md.). Cells were routinely passaged by trypsinization and dilution when they reached 90% confluence. Cells were seeded into 96-well plates (Falcon-Primaria #3872) at a density of 3000 cells/well for use in RT-PCR analysis.

[0263] For Northern blotting or other analyses, cells may be seeded onto 100 mm or other standard tissue culture plates and treated similarly, using appropriate volumes of medium and oligonucleotide.

[0264] Treatment with Antisense Compounds:

[0265] When cells reached 70% confluency, they were treated with oligonucleotide. For cells grown in 96-well plates, wells were washed once with 100 μL OPTI-MEM™-1 reduced-serum medium (Invitrogen Corporation, Carlsbad, Calif.) and then treated with 130 μL of OPTI-MEM™-1 containing 3.75 μg/mL LIPOFECTIN™ (Invitrogen Corporation, Carlsbad, Calif.) and the desired concentration of oligonucleotide. After 4-7 hours of treatment, the medium was replaced with fresh medium. Cells were harvested 16-24 hours after oligonucleotide treatment.

[0266] The concentration of oligonucleotide used varies from cell line to cell line. To determine the optimal oligonucleotide concentration for a particular cell line, the cells are treated with a positive control oligonucleotide at a range of concentrations. For human cells the positive control oligonucleotide is selected from either ISIS 13920 (TCCGTCATCGCTCCTCAGGG, SEQ ID NO: 1) which is targeted to human H-ras, or ISIS 18078, (GTGCGCGCGAGCCCGAAATC, SEQ ID NO: 2) which is targeted to human Jun-N-terminal kinase-2 (JNK2). Both controls are 2′-O-methoxyethyl gapmers (2′-O-methoxyethyls shown in bold) with a phosphorothioate backbone. For mouse or rat cells the positive control oligonucleotide is ISIS 15770, ATGCATTCTGCCCCCAAGGA, SEQ ID NO: 3, a 2′-O-methoxyethyl gapmer (2′-O-methoxyethyls shown in bold) with a phosphorothioate backbone which is targeted to both mouse and rat c-raf. The concentration of positive control oligonucleotide that results in 80% inhibition of c-Ha-ras (for ISIS 13920) or c-raf (for ISIS 15770) mRNA is then utilized as the screening concentration for new oligonucleotides in subsequent experiments for that cell line. If 80% inhibition is not achieved, the lowest concentration of positive control oligonucleotide that results in 60% inhibition of H-ras or c-raf mRNA is then utilized as the oligonucleotide screening concentration in subsequent experiments for that cell line. If 60% inhibition is not achieved, that particular cell line is deemed as unsuitable for oligonucleotide transfection experiments. The concentrations of antisense oligonucleotides used herein are from 50 nM to 300 nM.

### Example 10

[0267] Analysis of Oligonucleotide Inhibition of PTPRA Expression

[0268] Antisense modulation of PTPRA expression can be assayed in a variety of ways known in the art. For example, PTPRA mRNA levels can be quantitated by, e.g., Northern blot analysis, competitive polymerase chain reaction (PCR), or real-time PCR (RT-PCR). Real-time quantitative PCR is presently preferred. RNA analysis can be performed on total cellular RNA or poly(A)+ mRNA. The preferred method of RNA analysis of the present invention is the use of total cellular RNA as described in other examples herein. Methods of RNA isolation are taught in, for example, Ausubel, F. M. et al., Current Protocols in Molecular Biology, Volume 1, pp. 4.1.1-4.2.9 and 4.5.1-4.5.3, John Wiley & Sons, Inc., 1993. Northern blot analysis is routine in the art and is taught in, for example, Ausubel, F. M. et al., Current Protocols in Molecular Biology, Volume 1, pp. 4.2.1-4.2.9, John Wiley & Sons, Inc., 1996. Real-time quantitative (PCR) can be conveniently accomplished using the commercially available ABI PRISM™ 7700 Sequence Detection System, available from PE-Applied Biosystems, Foster City, Calif. and used according to manufacturer's instructions.

[0269] Protein levels of PTPRA can be quantitated in a variety of ways well known in the art, such as immunoprecipitation, Western blot analysis (immunoblotting), ELISA or fluorescence-activated cell sorting (FACS). Antibodies directed to PTPRA can be identified and obtained from a variety of sources, such as the MSRS catalog of antibodies (Aerie Corporation, Birmingham, Mich.), or can be prepared via conventional antibody generation methods. Methods for preparation of polyclonal antisera are taught in, for example, Ausubel, F. M. et al., (Current Protocols in Molecular Biology, Volume 2, pp. 11.12.1-11.12.9, John Wiley & Sons, Inc., 1997). Preparation of monoclonal antibodies is taught in, for example, Ausubel, F. M. et al., (Current Protocols in Molecular Biology, Volume 2, pp. 11.4.1-11.11.5, John Wiley & Sons, Inc., 1997).

[0270] Immunoprecipitation methods are standard in the art and can be found at, for example, Ausubel, F. M. et al., (Current Protocols in Molecular Biology, Volume 2, pp. 10.16.1-10.16.11, John Wiley & Sons, Inc., 1998). Western blot (immunoblot) analysis is standard in the art and can be found at, for example, Ausubel, F. M. et al., (Current Protocols in Molecular Biology, Volume 2, pp. 10.8.1-10.8.21, John Wiley & Sons, Inc., 1997). Enzyme-linked immunosorbent assays (ELISA) are standard in the art and can be found at, for example, Ausubel, F. M. et al., (Current Protocols in Molecular Biology, Volume 2, pp. 11.2.1-11.2.22, John Wiley & Sons, Inc., 1991).

### Example 11

[0271] Poly(A)+ mRNA Isolation

[0272] Poly(A)+ mRNA was isolated according to Miura et al., (Clin. Chem., 1996, 42, 1758-1764). Other methods for poly(A)+ mRNA isolation are taught in, for example, Ausubel, F. M. et al., (Current Protocols in Molecular Biology, Volume 1, pp. 4.5.1-4.5.3, John Wiley & Sons, Inc., 1993). Briefly, for cells grown on 96-well plates, growth medium was removed from the cells and each well was washed with 200 μL cold PBS. 60 μL lysis buffer (10 mM Tris-HCl, pH 7.6, 1 mM EDTA, 0.5 M NaCl, 0.5% NP-40, 20 mM vanadyl-ribonucleoside complex) was added to each well, the plate was gently agitated and then incubated at room temperature for five minutes. 55 μL of lysate was transferred to Oligo d(T) coated 96-well plates (AGCT Inc., Irvine Calif.). Plates were incubated for 60 minutes at room temperature, washed 3 times with 200 μL of wash buffer (10 mM Tris-HCl pH 7.6, 1 mM EDTA, 0.3 M NaCl). After the final wash, the plate was blotted on paper towels to remove excess wash buffer and then air-dried for 5 minutes. 60 μL of elution buffer (5 mM Tris-HCl pH 7.6), preheated to 70° C., was added to each well, the plate was incubated on a 90° C. hot plate for 5 minutes, and the eluate was then transferred to a fresh 96-well plate.

[0273] Cells grown on 100 mm or other standard plates may be treated similarly, using appropriate volumes of all solutions.

### Example 12

[0274] Total RNA Isolation

[0275] Total RNA was isolated using an RNEASY 96™ kit and buffers purchased from Qiagen Inc. (Valencia, Calif.) following the manufacturer's recommended procedures. Briefly, for cells grown on 96-well plates, growth medium was removed from the cells and each well was washed with 200 μL cold PBS. 150 μL Buffer RLT was added to each well and the plate vigorously agitated for 20 seconds. 150 μL of 70% ethanol was then added to each well and the contents mixed by pipetting three times up and down. The samples were then transferred to the RNEASY 96™ well plate attached to a QIAVAC™ manifold fitted with a waste collection tray and attached to a vacuum source. Vacuum was applied for 1 minute. 500 μL of Buffer RW1 was added to each well of the RNEASY 96™ plate and incubated for 15 minutes and the vacuum was again applied for 1 minute. An additional 500 μL of Buffer RW1 was added to each well of the RNEASY 96™ plate and the vacuum was applied for 2 minutes. 1 mL of Buffer RPE was then added to each well of the RNEASY 96™ plate and the vacuum applied for a period of 90 seconds. The Buffer RPE wash was then repeated and the vacuum was applied for an additional 3 minutes. The plate was then removed from the QIAVAC™ manifold and blotted dry on paper towels. The plate was then re-attached to the QIAVACTM manifold fitted with a collection tube rack containing 1.2 mL collection tubes. RNA was then eluted by pipetting 170 μL water into each well, incubating 1 minute, and then applying the vacuum for 3 minutes.

[0276] The repetitive pipetting and elution steps may be automated using a QIAGEN Bio-Robot 9604 (Qiagen, Inc., Valencia Calif.). Essentially, after lysing of the cells on the culture plate, the plate is transferred to the robot deck where the pipetting, DNase treatment and elution steps are carried out.

### Example 13

[0277] Real-Time Quantitative PCR Analysis of PTPRA mRNA Levels

[0278] Quantitation of PTPRA mRNA levels was determined by real-time quantitative PCR using the ABI PRISM™ 7700 Sequence Detection System (PE-Applied Biosystems, Foster City, Calif.) according to manufacturer's instructions. This is a closed-tube, non-gel-based, fluorescence detection system which allows high-throughput quantitation of polymerase chain reaction (PCR) products in real-time. As opposed to standard PCR in which amplification products are quantitated after the PCR is completed, products in real-time quantitative PCR are quantitated as they accumulate. This is accomplished by including in the PCR reaction an oligonucleotide probe that anneals specifically between the forward and reverse PCR primers, and contains two fluorescent dyes. A reporter dye (e.g., FAM or JOE, obtained from either PE-Applied Biosystems, Foster City, Calif., Operon Technologies Inc., Alameda, Calif. or Integrated DNA Technologies Inc., Coralville, Iowa) is attached to the 5′ end of the probe and a quencher dye (e.g., TAMRA, obtained from either PE-Applied Biosystems, Foster City, Calif., Operon Technologies Inc., Alameda, Calif. or Integrated DNA Technologies Inc., Coralville, Iowa) is attached to the 3′ end of the probe. When the probe and dyes are intact, reporter dye emission is quenched by the proximity of the 3′ quencher dye. During amplification, annealing of the probe to the target sequence creates a substrate that can be cleaved by the 5′-exonuclease activity of Taq polymerase. During the extension phase of the PCR amplification cycle, cleavage of the probe by Taq polymerase releases the reporter dye from the remainder of the probe (and hence from the quencher moiety) and a sequence-specific fluorescent signal is generated. With each cycle, additional reporter dye molecules are cleaved from their respective probes, and the fluorescence intensity is monitored at regular intervals by laser optics built into the ABI PRISM™ 7700 Sequence Detection System. In each assay, a series of parallel reactions containing serial dilutions of mRNA from untreated control samples generates a standard curve that is used to quantitate the percent inhibition after antisense oligonucleotide treatment of test samples.

[0279] Prior to quantitative PCR analysis, primer-probe sets specific to the target gene being measured are evaluated for their ability to be “multiplexed” with a GAPDH amplification reaction. In multiplexing, both the target gene and the internal standard gene GAPDH are amplified concurrently in a single sample. In this analysis, mRNA isolated from untreated cells is serially diluted. Each dilution is amplified in the presence of primer-probe sets specific for GAPDH only, target gene only (“single-plexing”), or both (multiplexing). Following PCR amplification, standard curves of GAPDH and target mRNA signal as a function of dilution are generated from both the single-plexed and multiplexed samples. If both the slope and correlation coefficient of the GAPDH and target signals generated from the multiplexed samples fall within 10% of their corresponding values generated from the single-plexed samples, the primer-probe set specific for that target is deemed multiplexable. Other methods of PCR are also known in the art.

[0280] PCR reagents were obtained from Invitrogen Corporation, (Carlsbad, Calif.). RT-PCR reactions were carried out by adding 20 μL PCR cocktail (2.5×PCR buffer (—MgCl2), 6.6 mM MgCl2, 375 μM each of DATP, dCTP, dCTP and dGTP, 375 nM each of forward primer and reverse primer, 125 nM of probe, 4 Units RNAse inhibitor, 1.25 Units PLATINUM® Taq, 5 Units MuLV reverse transcriptase, and 2.5× ROX dye) to 96-well plates containing 30 μL total RNA solution. The RT reaction was carried out by incubation for 30 minutes at 48° C. Following a 10 minute incubation at 95° C. to activate the PLATINUM® Taq, 40 cycles of a two-step PCR protocol were carried out: 95° C. for 15 seconds (denaturation) followed by 60° C. for 1.5 minutes (annealing/extension).

[0281] Gene target quantities obtained by real time RT-PCR are normalized using either the expression level of GAPDH, a gene whose expression is constant, or by quantifying total RNA using RiboGreenTM (Molecular Probes, Inc. Eugene, Oreg.). GAPDH expression is quantified by real time RT-PCR, by being run simultaneously with the target, multiplexing, or separately. Total RNA is quantified using RiboGreenTM RNA quantification reagent from Molecular Probes. Methods of RNA quantification by RiboGreenTM are taught in Jones, L. J., et al, (Analytical Biochemistry, 1998, 265, 368-374).

[0282] In this assay, 170 μL of RiboGreenTM working reagent (RiboGreenTM reagent diluted 1:350 in 10 mM Tris-HCl, 1 mM EDTA, pH 7.5) is pipetted into a 96-well plate containing 30 μL purified, cellular RNA. The plate is read in a CytoFluor 4000 (PE Applied Biosystems) with excitation at 480 nm and emission at 520 nm.

[0283] Probes and primers to human-PTPRA were designed to hybridize to a human PTPRA sequence, using published sequence information (GenBank accession number NM_{—}080841.1, incorporated herein as SEQ ID NO:4). For human PTPRA the PCR primers were:

[0284] forward primer: GGTGGACTACACAGTACGGAAGTTC (SEQ ID NO: 5)

[0285] reverse primer: GATGAGGCGCTGTGGCTTT (SEQ ID NO: 6) and the PCR probe was: FAM-CATCCAGCAGGTGGGCGACATG-TAMRA

[0286] (SEQ ID NO: 7) where FAM is the fluorescent dye and TAMRA is the quencher dye. For human GAPDH the PCR primers were:

[0287] forward primer: GAAGGTGAAGGTCGGAGTC(SEQ ID NO:8)

[0288] reverse primer: GAAGATGGTGATGGGATTTC (SEQ ID NO:9) and the PCR probe was: 5′ JOE-CAAGCTTCCCGTTCTCAGCC— TAMRA 3′ (SEQ ID NO: 10) where JOE is the fluorescent reporter dye and TAMRA is the quencher dye.

[0289] Probes and primers to mouse PTPRA were designed to hybridize to a mouse PTPRA sequence, using published sequence information (GenBank accession number NM_{—}008980.1, incorporated herein as SEQ ID NO:11). For mouse PTPRA the PCR primers were:

[0290] forward primer: GATATAATGAAATCCTCAGCCTGGA (SEQ ID NO:12)

[0291] reverse primer: GAATGAGTCTTAGGTTTATCTTCTTTAGGAA (SEQ ID NO: 13) and the PCR probe was: FAM-TGGGCCAGATTGTTCCTTGCTTCAAAT-TAMRA

[0292] (SEQ ID NO: 14) where FAM is the fluorescent reporter dye and TAMRA is the quencher dye. For mouse GAPDH the PCR primers were:

[0293] forward primer: GGCAAATTCAACGGCACAGT(SEQ ID NO:15)

[0294] reverse primer: GGGTCTCGCTCCTGGAAGAT(SEQ ID NO:16) and the PCR probe was: 5′ JOE-AAGGCCGAGAATGGGAAGCTTGTCATC— TAMRA 3′ (SEQ ID NO: 17) where JOE is the fluorescent reporter dye and TAMRA is the quencher dye.

### Example 14

[0295] Northern Blot Analysis of PTPRA mRNA Levels

[0296] Eighteen hours after antisense treatment, cell monolayers were washed twice with cold PBS and lysed in 1 mL RNAZOLTM (TEL-TEST “B” Inc., Friendswood, Tex.). Total RNA was prepared following manufacturer's recommended protocols. Twenty micrograms of total RNA was fractionated by electrophoresis through 1.2% agarose gels containing 1.1% formaldehyde using a MOPS buffer system (AMRESCO, Inc. Solon, Ohio). RNA was transferred from the gel to HYBOND™-N+ nylon membranes (Amersham Pharmacia Biotech, Piscataway, N.J.) by overnight capillary transfer using a Northern/Southern Transfer buffer system (TEL-TEST “B” Inc., Friendswood, Tex.). RNA transfer was confirmed by UV visualization. Membranes were fixed by UV cross-linking using a STRATALINKER™ UV Crosslinker 2400 (Stratagene, Inc, La Jolla, Calif.) and then probed using QUICKHYB™ hybridization solution (Stratagene, La Jolla, Calif.) using manufacturer's recommendations for stringent conditions.

[0297] To detect human PTPRA, a human PTPRA specific probe was prepared by PCR using the forward primer GGTGGACTACACAGTACGGAAGTTC (SEQ ID NO: 5) and the reverse primer GATGAGGCGCTGTGGCTTT (SEQ ID NO: 6). To normalize for variations in loading and transfer efficiency membranes were stripped and probed for human glyceraldehyde-3-phosphate dehydrogenase (GAPDH) RNA (Clontech, Palo Alto, Calif.).

[0298] To detect mouse PTPRA, a mouse PTPRA specific probe was prepared by PCR using the forward primer GATATAATGAAATCCTCAGCCTGGA (SEQ ID NO: 12) and the reverse primer GAATGAGTCTTAGGTTTATCTTCTTTAGGAA (SEQ ID NO: 13). To normalize for variations in loading and transfer efficiency membranes were stripped and probed for mouse glyceraldehyde-3-phosphate dehydrogenase (GAPDH) RNA (Clontech, Palo Alto, Calif.).

[0299] Hybridized membranes were visualized and quantitated using a PHOSPHORIMAGERTM and IMAGEQUANTTM Software V3.3 (Molecular Dynamics, Sunnyvale, Calif.). Data was normalized to GAPDH levels in untreated controls.

### Example 15

[0300] Antisense Inhibition of Human PTPRA Expression by Chimeric Phosphorothioate Oligonucleotides having 2′-MOE Wings and a Deoxy Gap

[0301] In accordance with the present invention, a series of oligonucleotides were designed to target different regions of the human PTPRA RNA, using published sequences (GenBank accession number NM_{—}080841.1, representing a human PTPRA variant herein designated hPTPRA-3, incorporated herein as SEQ ID NO: 4; GenBank accession number M34668.1, representing the main mRNA of human PTPRA, herein designated hPTPRA, incorporated herein as SEQ ID NO: 18; a consensus sequence constructed from GenBank accession numbers AL161656.15 and AL121905.23, representing a genomic sequence of human PTPRA, incorporated herein as SEQ ID NO: 19; GenBank accession number X54890.1, representing a human PTPRA variant herein designated hPTPRA-4, incorporated herein as SEQ ID NO: 20; GenBank accession number X53364.1, representing a human PTPRA variant herein designated hPTPRA-5, incorporated herein as SEQ ID NO: 21; GenBank accession number AF121183.1, representing a 5′-extension of SEQ ID NO: 18, incorporated herein as SEQ ID NO: 22; the complement of GenBank accession number BE168541.1, representing a 5′-extenstion of SEQ ID NO: 22 incorporated herein as SEQ ID NO: 23; the complement of GenBank accession number AW024120.1, representing a 5′-extension of SEQ ID NO: 20, incorporated herein as SEQ ID NO: 24; the complement of GenBank accession number AA903762.1, representing a 3′-extension of SEQ ID NO: 18, incorporated herein as SEQ ID NO: 25; the complement of GenBank accession number AI674319.1, representing a variant of human PTPRA herein designated hPTPRA-7, incorporated herein as SEQ ID NO: 26, and residues 2749000-2925000 of GenBank accession number NT_{—}011387.6, representing a genomic sequence of human PRPTA, incorporated herein as SEQ ID NO: 27). The oligonucleotides are shown in Table 1. “Target site” indicates the first (5′-most) nucleotide number on the particular target sequence to which the oligonucleotide binds. All compounds in Table 1 are chimeric oligonucleotides (“gapmers”) 20 nucleotides in length composed of a central “gap” region consisting of ten 2′-deoxynucleotides, which is flanked on both sides (5′ and 3′ directions) by five-nucleotide “wings”. The wings are composed of 2′-methoxyethyl (2′-MOE)nucleotides. The internucleoside (backbone) linkages are phosphorothioate (P═S) throughout the oligonucleotide. All cytidine residues are 5-methylcytidines. The compounds were analyzed for their effect on human PTPRA mRNA levels by quantitative real-time PCR as described in other examples herein. Data are averages from two experiments in which T-24 cells were treated with the oligonucleotides of the present invention. The positive control for each datapoint is identified in the table by sequence ID number. If present, “N.D.” indicates “no data”.

TABLE 1
Inhibition of human PTPRA mRNA levels by chimeric
phosphorothioate oligonucleotides having 2′-MOE wings and a
deoxy gap

| | | | | | | | |
|---|---|---|---|---|---|---|---|
| | | TARGET | | | | | CONTROL |
| | | SEQ ID | TARGET | | | SEQ ID | SEQ ID |
| ISIS # | REGION | NO | SITE | SEQUENCE | % INHIB | NO | NO |

| | | | | | | | |
|---|---|---|---|---|---|---|---|
| 147239 | Coding | 27 | 101612 | ttggtgccacagaaagagaa | 83 | 28 | 2 |
| 147240 | Coding | 27 | 101621 | ggctgaatgttggtgccaca | 82 | 29 | 2 |
| 147244 | Coding | 27 | 123433 | agggccaccatcaccgcaat | 72 | 30 | 2 |
| 147246 | Coding | 27 | 123448 | actagcagagaggacagggc | 83 | 31 | 2 |
| 147247 | Coding | 4 | 706 | cttaaaccttaacatgtaca | 62 | 32 | 2 |
| 147252 | Coding | 27 | 141723 | acaggtggcctggataggac | 91 | 33 | 2 |
| 147253 | Coding | 27 | 141728 | gcctcacaggtggcctggat | 81 | 34 | 2 |
| 147256 | Coding | 27 | 144039 | ttgatgtaatcagaatctgg | 94 | 35 | 2 |
| 147259 | Coding | 27 | 158044 | cgtactgtgtagtccaccag | 95 | 36 | 2 |
| 147260 | Coding | 4 | 1338 | cccacctgctggatgcagaa | 98 | 37 | 2 |
| 147262 | Coding | 27 | 158737 | ggaactgagtgatgaggcgc | 89 | 38 | 2 |
| 147263 | Coding | 27 | 158815 | aggccttcaccttcttgagg | 87 | 39 | 2 |
| 147267 | Coding | 27 | 161150 | agataatgctccagaagggc | 66 | 40 | 2 |
| 147269 | Coding | 27 | 163359 | cgcatcttgtcattctggat | 87 | 41 | 2 |
| 147270 | Coding | 27 | 163783 | actggaatgatcactctgtt | 90 | 42 | 2 |
| 147272 | Coding | 27 | 164391 | tggagaagagggccctggct | 89 | 43 | 2 |
| 147273 | Coding | 27 | 164429 | tccactcccagatcattcgc | 78 | 44 | 2 |
| 147274 | Coding | 4 | 2104 | ggcacacttctcctggcctc | 80 | 45 | 2 |
| 147275 | Intron: | 27 | 172236 | tactgggcacacttctcctg | 77 | 46 | 2 |
| | Exon | | | | | | |
| | Junction | | | | | | |
| 147276 | Intron: | 27 | 172246 | agatggccagtactgggcac | 93 | 47 | 2 |
| | Exon | | | | | | |
| | Junction | | | | | | |
| 147278 | Coding | 27 | 172302 | cattcctcctccttcttcag | 78 | 48 | 2 |
| 147279 | Coding | 27 | 172336 | ggtgaccaggaggtctcgga | 75 | 49 | 2 |
| 147280 | coding | 27 | 172341 | gtgttggtgaccaggaggtc | 84 | 50 | 2 |
| 147281 | Coding | 4 | 2223 | ttctccctggtgttggtgac | 71 | 51 | 2 |
| 147282 | Coding | 27 | 172462 | tggaagtggaactgccggat | 66 | 52 | 2 |
| 147283 | Coding | 27 | 173896 | agccgcaggctcttgacagt | 70 | 53 | 2 |
| 147285 | Coding | 27 | 174766 | acttgaagttggcataatct | 74 | 54 | 2 |
| 147288 | Coding | 27 | 174875 | ttctaaaacagttataagat | 65 | 55 | 2 |
| 147291 | Coding | 27 | 174937 | agtgctaacacatttacata | 35 | 56 | 2 |
| 147297 | Coding | 27 | 175134 | agagctctgagaactttgtg | 78 | 57 | 2 |
| 194483 | 5′UTR | 18 | 20 | acctgctcccctgagcgtgt | 47 | 58 | 2 |
| 194484 | 5′UTR | 18 | 470 | gtgtcatgtagagacaggtc | 22 | 59 | 2 |
| 194485 | Start | 18 | 685 | ggaatccatgcttgttagct | 52 | 60 | 2 |
| | Codon | | | | | | |
| 194486 | Coding | 18 | 716 | gaccactgccgagcagaaca | 91 | 61 | 2 |
| 194487 | Coding | 18 | 1063 | tgctgcggtgctggaattcc | 82 | 62 | 2 |
| 194488 | Coding | 18 | 2026 | acctgtacgccctacacctg | 84 | 63 | 2 |
| 194489 | Stop | 18 | 3094 | tgttgccgcttacttgaagt | 83 | 64 | 2 |
| | Codon | | | | | | |
| 194490 | 3′UTR | 18 | 3338 | aatttctcggctgaggattt | 63 | 65 | 2 |
| 194491 | Exon: | 19 | 2575 | tgggccaaaccttggctgca | 7 | 66 | 2 |
| | Intron | | | | | | |
| | Junction | | | | | | |
| 194492 | Exon: | 19 | 11234 | gaacactcacagagtcgggc | 81 | 67 | 2 |
| | Intron | | | | | | |
| | Junction | | | | | | |
| 194493 | Intron | 19 | 30977 | cataatatattaagtacagc | 1 | 68 | 2 |
| 194494 | Intron: | 19 | 60678 | gttgtgtcacctgcaacaaa | 66 | 69 | 2 |
| | Exon | | | | | | |
| | Junction | | | | | | |
| 194495 | Intron | 19 | 85496 | cagtacttactagcttcttt | 85 | 70 | 2 |
| 194496 | Intron: | 19 | 93080 | tgaagaagtcctagaacacc | 57 | 71 | 2 |
| | Exon | | | | | | |
| | Junction | | | | | | |
| 194497 | Intron: | 19 | 101743 | ccatgcttatctggaaaata | 72 | 72 | 2 |
| | Exon | | | | | | |
| | Junction | | | | | | |
| 194498 | Exon: | 19 | 124321 | gtaggctcaccttaacatgt | 68 | 73 | 2 |
| | Intron | | | | | | |
| | Junction | | | | | | |
| 194499 | Intron: | 19 | 125366 | gacaggtcatgcacaccctg | 86 | 74 | 2 |
| | Exon | | | | | | |
| | Junction | | | | | | |
| 194500 | Intron: | 19 | 125503 | tttcttaaacctaatgagaa | 94 | 75 | 2 |
| | Exon | | | | | | |
| | Junction | | | | | | |
| 194501 | Exon: | 19 | 125577 | aatgccttacccacatcctc | 52 | 76 | 2 |
| | Intron | | | | | | |
| | Junction | | | | | | |
| 194502 | Intron | 19 | 127990 | caggctggtttcgaactcct | 87 | 77 | 2 |
| 194503 | Intron | 19 | 132617 | ttaaagccaaatttcttttc | 76 | 78 | 2 |
| 194504 | Intron | 19 | 151456 | gcccagccccaaagtgcttc | 92 | 79 | 2 |
| 194505 | 5′UTR | 20 | 49 | gttgtgtcacagagtcgggc | 6 | 80 | 2 |
| 194506 | Coding | 20 | 592 | ggtgtctcatctgaaggagg | 91 | 81 | 2 |
| 194507 | 5′UTR | 21 | 73 | tgaagaagtctagcttcttt | 9 | 82 | 2 |
| 194508 | Start | 21 | 165 | atccatgcttatcaccaggg | 31 | 83 | 2 |
| | Codon | | | | | | |
| 194509 | 5′UTR | 22 | 51 | ggctcgagccacatccccat | 13 | 84 | 2 |
| 194510 | 5′UTR | 22 | 148 | acaccttgatggccagctcc | 35 | 85 | 2 |
| 194511 | 5′UTR | 23 | 115 | agcagcacctggatggtgag | 36 | 86 | 2 |
| 194512 | 5′UTR | 23 | 218 | ccagtgggccaggatcctgc | 46 | 87 | 2 |
| 194513 | 5′UTR | 24 | 20 | gttcattgctgttcagagac | 14 | 88 | 2 |
| 194514 | 5′UTR | 24 | 183 | cctcgcctccatggcgaggg | 39 | 89 | 2 |
| 194515 | 3′UTR | 25 | 115 | cccatgatatcagtggtggg | 69 | 90 | 2 |
| 194516 | 3′UTR | 25 | 190 | ctcagggagtcaaagctttt | 49 | 91 | 2 |
| 194517 | Exon: | 26 | 197 | gggctccacatcctcagtgc | 86 | 92 | 2 |
| | Exon | | | | | | |
| | Junction | | | | | | |

[0302] As shown in Table 1, SEQ ID NOs 28, 29, 30, 31, 32, 33, 34, 35, 36, 37, 38, 39, 40, 41, 42, 43, 44, 45, 46, 47, 48, 49, 50, 51, 52, 53, 54, 55, 57, 60, 61, 62, 63, 64, 65, 67, 69, 70, 71, 72, 73, 74, 75, 76, 77, 78, 79, 81, 90 and 92 demonstrated at least 50% inhibition of human PTPRA expression in this assay and are therefore preferred. The target sites to which these preferred sequences are compementary are herein referred to as “preferred target regions” and are therefore preferred sites for targeting by compounds of the present invention. These preferred target regions are shown in Table 3. The sequences represent the reverse complement of the preferred antisense compounds shown in Table 1. “Target site” indicates the first (5′-most) nucleotide number of the corresponding target nucleic acid. Also shown in Table 3 is the species in which each of the preferred target regions was found.

### Example 16

[0303] Antisense Inhibition of Mouse PTPRA Expression by Chimeric Phosphorothioate Oligonucleotides having 2′-MOE Wings and a Deoxy Gap.

[0304] In accordance with the present invention, a second series of oligonucleotides were designed to target different regions of the mouse PTPRA RNA, using published sequences (GenBank accession number NM_{—}008980.1, representing a variant of mouse PTPRA herein designated mPTPRA-2, incorporated herein as SEQ ID NO: 11; GenBank accession number AW323517.1, representing a 5′-extension of SEQ ID NO: 11, incorporated herein as SEQ ID NO: 93; GenBank accession numbers L13686.1, L13668.1, L13670.1, L13672.1, L13674.1, L13675.1, L13676.1 and L13608.1, representing partial genomic sequences of mouse PTPRA, incorporated herein as SEQ ID NOs: 94, 95, 96, 97, 98, 99, 100 and 101 respectively; and GenBank accession number BE372094.1, representing the main mRNA of mouse PTPRA, herein designated mPTPRA, incorporated herein as SEQ ID NO: 102). The oligonucleotides are shown in Table 2. “Target site” indicates the first (5′-most) nucleotide number on the particular target sequence to which the oligonucleotide binds. All compounds in Table 2 are chimeric oligonucleotides (“gapmers”) 20 nucleotides in length, composed of a central “gap” region consisting of ten 2′-deoxynucleotides, which is flanked on both sides (5′ and 3′ directions) by five-nucleotide “wings”. The wings are composed of 2′-methoxyethyl (2′-MOE)nucleotides. The internucleoside (backbone) linkages are phosphorothioate (P═S) throughout the oligonucleotide. All cytidine residues are 5-methylcytidines. The compounds were analyzed for their effect on mouse PTPRA mRNA levels by quantitative real-time PCR as described in other examples herein. Data are averages from two experiments. The positive control for each datapoint is identified in the table by sequence ID number. If present, “N.D.” indicates “no data”.

TABLE 2
Inhibition of mouse PTPRA mRNA levels by chimeric
phosphorothioate oligonucleotides having 2′-MOE wings and a
deoxy gap

| | | | | | | | |
|---|---|---|---|---|---|---|---|
| | | TARGET | | | | | CONTROL |
| | | SEQ ID | TARGET | | | SEQ ID | SEQ ID |
| ISIS # | REGION | NO | SITE | SEQUENCE | % INHIB | NO | NO |

| | | | | | | | |
|---|---|---|---|---|---|---|---|
| 147237 | Start | 11 | 17 | caggaatccatgctgaccga | 77 | 103 | 1 |
| | Codon | | | | | | |
| 147238 | Start | 11 | 25 | gaatgaaccaggaatccatg | 1 | 104 | 1 |
| | Codon | | | | | | |
| 147241 | Coding | 11 | 376 | tcccctcccagggttctgtt | 1 | 105 | 1 |
| 147242 | Coding | 11 | 407 | gtttctggagtggttgctgc | 54 | 106 | 1 |
| 147243 | Coding | 11 | 445 | tcaccgcaataattggtgtc | 49 | 107 | 1 |
| 147245 | Coding | 11 | 460 | aggacagggccaccatcacc | 73 | 108 | 1 |
| 147248 | Coding | 11 | 519 | gtatttcttaaaecttaaca | 25 | 109 | 1 |
| 147249 | Coding | 11 | 531 | cccagcttgcttgtatttct | 73 | 110 | 1 |
| 147250 | Coding | 11 | 665 | tcctcttccagcttgtccac | 52 | 111 | 1 |
| 147251 | Coding | 11 | 735 | aggacaagcagggagagcgt | 57 | 112 | 1 |
| 147254 | Coding | 11 | 876 | tctttctaacaatggagtgg | 4 | 113 | 1 |
| 147255 | Coding | 11 | 926 | gagtggtcatctgagagaca | 0 | 114 | 1 |
| 147257 | Coding | 11 | 1040 | tcttttggtccttgtgcagc | 39 | 115 | 1 |
| 147258 | Coding | 11 | 1177 | tcccataggtccagcagcct | 83 | 116 | 1 |
| 147261 | Coding | 11 | 1258 | cgtcgcccacctgctggatg | 71 | 117 | 1 |
| 147264 | Coding | 11 | 1385 | tgagggttacaggccttcac | 52 | 118 | 1 |
| 147265 | Coding | 11 | 1489 | ctttgcgttccgaatgcatc | 52 | 119 | 1 |
| 147266 | Coding | 11 | 1523 | gcccggatccggctcacaaa | 0 | 120 | 1 |
| 147268 | Coding | 11 | 1711 | aagttaatttcttaaactcc | 14 | 121 | 1 |
| 147271 | Coding | 11 | 1903 | tggcaatgtaggagtctttc | 56 | 122 | 1 |
| 147277 | Coding | 11 | 2039 | ccatcagatggccagtactg | 27 | 123 | 1 |
| 147284 | Coding | 11 | 2430 | atactgttccagtgtctgga | 38 | 124 | 1 |
| 147286 | Stop | 11 | 2504 | gtcacctgtcacttgaagtt | 63 | 125 | 1 |
| | Codon | | | | | | |
| 147287 | 3′UTR | 11 | 2585 | aagatatatacaattttggg | 0 | 126 | 1 |
| 147289 | 3′UTR | 11 | 2606 | tgccatttctaaaacagtta | 66 | 127 | 1 |
| 147290 | 3′UTR | 11 | 2627 | aacaggtaatagaagcctat | 66 | 128 | 1 |
| 147292 | 3′UTR | 11 | 2670 | aggactatcagtgctaacac | 75 | 129 | 1 |
| 147293 | 3′UTR | 11 | 2763 | gcaaggaacaatctggccca | 96 | 130 | 1 |
| 147294 | 3′UTR | 11 | 2788 | tcttctttaggaaaagatat | 37 | 131 | 1 |
| 147295 | 3′UTR | 11 | 2805 | aatgagtcttaggtttatct | 48 | 132 | 1 |
| 147296 | 3′UTR | 11 | 2830 | ttttagttggcactgagcta | 40 | 133 | 1 |
| 147298 | 3′UTR | 11 | 2860 | cctcaagagctctgagaact | 78 | 134 | 1 |
| 147299 | 3′UTR | 11 | 2867 | accatttcctcaagagctct | 76 | 135 | 1 |
| 147300 | 3′UTR | 11 | 2971 | tgcctgaggtggctgatctt | 55 | 136 | 1 |
| 147301 | 3′UTR | 11 | 3024 | ctgacgatccctgctgtggt | 60 | 137 | 1 |
| 147302 | 3′UTR | 11 | 3039 | aagagtgtttattacctgac | 35 | 138 | 1 |
| 147303 | 5′UTR | 93 | 28 | atgcccccgcgagtccctgt | 71 | 139 | 1 |
| 147304 | 5′UTR | 93 | 93 | gaagcggcagagagaggact | 35 | 140 | 1 |
| 147305 | Intron | 94 | 2 | agagtggtcatctgcaaaca | 15 | 141 | 1 |
| 147306 | Intron: | 95 | 1 | cacatttacactacaatgaa | 14 | 142 | 1 |
| | Exon | | | | | | |
| | Junction | | | | | | |
| 147307 | Intron; | 96 | 1 | tacacctgcactgtagccag | 49 | 143 | 1 |
| | Exon | | | | | | |
| | Junction | | | | | | |
| 147308 | Intron: | 97 | 3 | tgaagttaatttctgaatga | 0 | 144 | 1 |
| | Exon | | | | | | |
| | Junction | | | | | | |
| 147309 | Exon: | 98 | 136 | ttgaactcacctggcctctc | 61 | 145 | 1 |
| | Intron | | | | | | |
| | Junction | | | | | | |
| 147310 | Exon: | 99 | 122 | ctcaccctggtgttggtgac | 18 | 146 | 1 |
| | Intron | | | | | | |
| | Junction | | | | | | |
| 147311 | Intron: | 100 | 1 | tcttgttctcctttggaaga | 19 | 147 | 1 |
| | Exon | | | | | | |
| | Junction | | | | | | |
| 147312 | 3′UTR | 101 | 138 | ataagactgctctgcccaag | 65 | 148 | 1 |
| 147313 | 3′UTR | 101 | 167 | taggaacaacccaggagagc | 58 | 149 | 1 |
| 147314 | Exon: | 102 | 633 | tagagtgttcttagggcagg | 28 | 150 | 1 |
| | Intron | | | | | | |
| | Junction | | | | | | |

[0305] As shown in Table 2, SEQ ID NOs 103, 106, 108, 110, 111, 112, 116, 117, 118, 119, 122, 125, 127, 128, 129, 130, 134, 135, 136, 137, 139, 145, 148 and 149 demonstrated at least 50% inhibition of mouse PTPRA expression in this experiment and are therefore preferred. The target sites to which these preferred sequences are complementary are herein referred to as “preferred target regions” and are therefore preferred sites for targeting by compounds of the present invention. These preferred target regions are shown in Table 3. The sequences represent the reverse complement of the preferred antisense compounds shown in Table 1. “Target site” indicates the first (5′-most) nucleotide number of the corresponding target nucleic acid. Also shown in Table 3 is the species in which each of the preferred target regions was found.

TABLE 3

Sequence and position of preferred target regions identified
in PTPRA.

| | | | | | | |
|---|---|---|---|---|---|---|
| | TARGET | | | | | |
| | SEQ ID | TARGET | | REV COMP | | SEQ ID |
| SITEID | NO | SITE | SEQUENCE | OF SEQ ID | ACTIVE IN | NO |

| | | | | | | |
|---|---|---|---|---|---|---|
| 62483 | 27 | 101612 | ttctctttctgtggcaccaa | 28 | H. sapiens | 151 |
| 62484 | 27 | 101621 | tgtggcaccaacattcagcc | 29 | H. sapiens | 152 |
| 62488 | 27 | 123433 | attgcggtgatggtggccct | 30 | H. sapiens | 153 |
| 62490 | 27 | 123448 | gccctgtcctctctgctagt | 31 | H. sapiens | 154 |
| 62491 | 4 | 706 | tgtacatgttaaggtttaag | 32 | H. sapiens | 155 |
| 62496 | 27 | 141723 | gtcctatccaggccacctgt | 33 | H. sapiens | 156 |
| 62497 | 27 | 141728 | atccaggccacctgtgaggc | 34 | H. sapiens | 157 |
| 62500 | 27 | 144039 | ccagattctgattacatcaa | 35 | H. sapiens | 158 |
| 62503 | 27 | 158044 | ctggtggactacacagtacg | 36 | H. sapiens | 159 |
| 62504 | 4 | 1338 | ttctgcatccagcaggtggg | 37 | H. sapiens | 160 |
| 62506 | 27 | 158737 | gcgcctcatcactcagttcc | 38 | H. sapiens | 161 |
| 62507 | 27 | 158815 | cctcaagaaggtgaaggcct | 39 | H. sapiens | 162 |
| 62511 | 27 | 161150 | gcccttctggagcattatct | 40 | H. sapiens | 163 |
| 62513 | 27 | 163359 | atccagaatgacaagatgcg | 41 | H. sapiens | 164 |
| 62514 | 27 | 163783 | aacagagtgatcattccagt | 42 | H. sapiens | 165 |
| 62516 | 27 | 164391 | agccagggccctcttctcca | 43 | H. sapiens | 166 |
| 62517 | 27 | 164429 | gcgaatgatctgggagtgga | 44 | H. sapiens | 167 |
| 62518 | 4 | 2104 | gaggccaggagaagtgtgcc | 45 | H. sapiens | 168 |
| 62519 | 27 | 172236 | caggagaagtgtgcccagta | 46 | H. sapiens | 169 |
| 62520 | 27 | 172246 | gtgcccagtactggccatct | 47 | H. sapiens | 170 |
| 62522 | 27 | 172302 | ctgaagaaggaggaggaatg | 48 | H. sapiens | 171 |
| 62523 | 27 | 172336 | tccgagacctcctggtcacc | 49 | H. sapiens | 172 |
| 62524 | 27 | 172341 | gacctcctggtcaccaacac | 50 | H. sapiens | 173 |
| 62525 | 4 | 2223 | gtcaccaacaccagggagaa | 51 | H. sapiens | 174 |
| 62526 | 27 | 172462 | atccggcagttccacttcca | 52 | H. sapiens | 175 |
| 62527 | 27 | 173896 | actgtcaagagcctgcggct | 53 | H. sapiens | 176 |
| 62529 | 27 | 174766 | agattatgccaacttcaagt | 54 | H. sapiens | 177 |
| 62532 | 27 | 174875 | atcttataactgttttagaa | 55 | H. sapiens | 178 |
| 62541 | 27 | 175134 | cacaaagttctcagagctct | 57 | H. sapiens | 179 |
| 112597 | 18 | 685 | agctaacaagcatggattcc | 60 | H. sapiens | 180 |
| 112598 | 18 | 716 | tgttctgctcggcagtggtc | 61 | H. sapiens | 181 |
| 112599 | 18 | 1063 | ggaattccagcaccgcagca | 62 | H. sapiens | 182 |
| 112600 | 18 | 2026 | caggtgtagggcgtacaggt | 63 | H. sapiens | 183 |
| 112601 | 18 | 3094 | acttcaagtaagcggcaaca | 64 | H. sapiens | 184 |
| 112602 | 18 | 3338 | aaatcctcagccgagaaatt | 65 | H. sapiens | 185 |
| 112604 | 19 | 11234 | gcccgactctgtgagtgttc | 67 | H. sapiens | 186 |
| 112606 | 19 | 60678 | tttgttgcaggtgacacaac | 69 | H. sapiens | 187 |
| 112607 | 19 | 85496 | aaagaagctagtaagtactg | 70 | H. sapiens | 188 |
| 112608 | 19 | 93080 | ggtgttctaggacttcttca | 71 | H. sapiens | 189 |
| 112609 | 19 | 101743 | tattttccagataagcatgg | 72 | H. sapiens | 190 |
| 112610 | 19 | 124321 | acatgttaaggtgagcctac | 73 | H. sapiens | 191 |
| 112611 | 19 | 125366 | cagggtgtgcatgacctgtc | 74 | H. sapiens | 192 |
| 112612 | 19 | 125503 | ttctcattaggtttaagaaa | 75 | H. sapiens | 193 |
| 112613 | 19 | 125577 | gaggatgtgggtaaggcatt | 76 | H. sapiens | 194 |
| 112614 | 19 | 127990 | aggagttcgaaaccagcctg | 77 | H. sapiens | 195 |
| 112615 | 19 | 132617 | gaaaagaaatttggctttaa | 78 | H. sapiens | 196 |
| 112616 | 19 | 151456 | gaagcactttggggctgggc | 79 | H. sapiens | 197 |
| 112618 | 20 | 592 | cctccttcagatgagacacc | 81 | H. sapiens | 198 |
| 112627 | 25 | 115 | cccaccactgatatcatggg | 90 | H. sapiens | 199 |
| 112629 | 26 | 197 | gcactgaggatgtggagccc | 92 | H. sapiens | 200 |
| 62481 | 11 | 17 | tcggtcagcatggattcctg | 103 | M. musculus | 201 |
| 62486 | 11 | 407 | gcagcaaccactccagaaac | 106 | M. musculus | 202 |
| 62489 | 11 | 460 | ggtgatggtggccctgtcct | 108 | M. musculus | 203 |
| 62493 | 11 | 531 | agaaatacaagcaagctggg | 110 | M. musculus | 204 |
| 62494 | 11 | 665 | gtggacaagctggaagagga | 111 | M. musculus | 205 |
| 62495 | 11 | 735 | acgctctccctgcttgtcct | 112 | M. musculus | 206 |
| 62502 | 11 | 1177 | aggctgctggacctatggga | 116 | M. musculus | 207 |
| 62505 | 11 | 1258 | catccagcaggtgggcgacg | 117 | M. musculus | 208 |
| 62508 | 11 | 1385 | gtgaaggcctgtaaccctca | 118 | M. musculus | 209 |
| 62509 | 11 | 1489 | gatgcattcggaacgcaaag | 119 | M. musculus | 210 |
| 62515 | 11 | 1903 | gaaagactcctacattgcca | 122 | M. musculus | 211 |
| 62530 | 11 | 2504 | aacttcaagtgacaggtgac | 125 | M. musculus | 212 |
| 62533 | 11 | 2606 | taactgttttagaaatggca | 127 | M. musculus | 213 |
| 62534 | 11 | 2627 | ataggcttctattacctgtt | 128 | M. musculus | 214 |
| 62536 | 11 | 2670 | gtgttagcactgatagtcct | 129 | M. musculus | 215 |
| 62537 | 11 | 2763 | tgggccagattgttccttgc | 130 | M. musculus | 216 |
| 62542 | 11 | 2860 | agttctcagagctcttgagg | 134 | M. musculus | 217 |
| 62543 | 11 | 2867 | agagctcttgaggaaatggt | 135 | M. musculus | 218 |
| 62544 | 11 | 2971 | aagatcagccacctcaggca | 136 | M. musculus | 219 |
| 62545 | 11 | 3024 | accacagcagggatcgtcag | 137 | M. musculus | 220 |
| 62547 | 93 | 28 | acagggactcgcgggggcat | 139 | M. musculus | 221 |
| 62553 | 98 | 136 | gagaggccaggtgagttcaa | 145 | M. musculus | 222 |
| 62556 | 101 | 138 | cttgggcagagcagtcttat | 148 | M. musculus | 223 |
| 62557 | 101 | 167 | gctctcctgggttgttccta | 149 | M. musculus | 224 |

[0306] As these “preferred target regions” have been found by experimentation to be open to, and accessible for, hybridization with the antisense compounds of the present invention, one of skill in the art-will recognize or be able to ascertain, using no more than routine experimentation, further embodiments of the invention that encompass other compounds that specifically hybridize to these sites and consequently inhibit the expression of PTPRA.

[0307] In one embodiment, the “preferred target region” may be employed in screening candidate antisense compounds. “Candidate antisense compounds” are those that inhibit the expression of a nucleic acid molecule encoding PTPRA and which comprise at least an 8-nucleobase portion which is complementary to a preferred target region. The method comprises the steps of contacting a preferred target region of a nucleic acid molecule encoding PTPRA with one or more candidate antisense compounds, and selecting for one or more candidate antisense compounds which inhibit the expression of a nucleic acid molecule encoding PTPRA. Once it is shown that the candidate antisense compound or compounds are capable of inhibiting the expression of a nucleic acid molecule encoding PTPRA, the candidate antisense compound may be employed as an antisense compound in accordance with the present invention.

[0308] According to the present invention, antisense compounds include ribozymes, external guide sequence (EGS) oligonucleotides (oligozymes), and other short catalytic RNAs or catalytic oligonucleotides which hybridize to the target nucleic acid and modulate its expression.

### Example 17

[0309] Western Blot Analysis of PTPRA Protein Levels

[0310] Western blot analysis (immunoblot analysis) is carried out using standard methods. Cells are harvested 16-20 h after oligonucleotide treatment, washed once with PBS, suspended in Laemmli buffer (100 ul/well), boiled for 5 minutes and loaded on a 16% SDS-PAGE gel. Gels are run for 1.5 hours at 150 V, and transferred to membrane for western blotting. Appropriate primary antibody directed to PTPRA is used, with a radiolabeled or fluorescently labeled secondary antibody directed against the primary antibody species. Bands are visualized using a PHOSPHORIMAGER™ (Molecular Dynamics, Sunnyvale Calif.).

### Example 18

[0311] Targeting of Individual Oligonucleotides to Specific Variants of Human PTPRA.

[0312] It is advantageous to selectively inhibit the expression of one or more variants of PTPRA. Consequently, in one embodiment of the present invention are oligonucleotides that selectively target, hybridize to, and specifically inhibit one or more, but fewer than all of the variants of human PTPRA. A summary of the target sites of the PTPRA main mRNA and variants is shown in Table 4 and includes GenBank accession number NM_{—}080841.1, representing hPTPRA-3, incorporated herein as SEQ ID NO: 4; GenBank accession number M34668.1, representing hPTPRA main mRNA, incorporated herein as SEQ ID NO: 18; GenBank accession number X54890.1, representing hPTPRA-4, incorporated herein as SEQ ID NO: 20; GenBank accession number X53364.1, representing hPTPRA-5, incorporated herein as SEQ ID NO: 21; the complement of GenBank accession number AI674319.1, representing hPTPRA-7, incorporated herein as SEQ ID NO: 26; GenBank accession number NM_{—}002836.1, representing hPTPRA-1, incorporated herein as SEQ ID NO: 225; GenBank accession number NM_{—}050840.1, representing hPTPRA-2, incorporated herein as SEQ ID NO: 226; and GenBank accession number X54130.1, representing hPTPRA-6, incorporated herein as SEQ ID NO: 227.

TABLE 4
Targeting of individual oligonucleotides to specific variants
of human PTPRA

| | OLIGO SEQ | | | VARIANT |
|---|---|---|---|---|
| ISIS # | ID NO. | TARGET SITE | VARIANT | SEQ ID NO. |
| 147239 | 28 | 389 | hPTPRA-3 | 4 |
| 147239 | 28 | 866 | hPTPRA | 18 |
| 147239 | 28 | 357 | hPTPRA-4 | 20 |
| 147239 | 28 | 349 | hPTPR-5 | 21 |
| 147239 | 28 | 857 | hPTPRA-1 | 225 |
| 147239 | 28 | 520 | hPTPRA-2 | 226 |
| 147239 | 28 | 201 | hPTPRA-6 | 227 |
| 147240 | 29 | 398 | hPTPRA-3 | 4 |
| 147240 | 29 | 875 | hPTPRA | 18 |
| 147240 | 29 | 366 | hPTPRA-4 | 20 |
| 147240 | 29 | 358 | hPTPR-5 | 21 |
| 147240 | 29 | 866 | hPTPRA-1 | 225 |
| 147240 | 29 | 529 | hPTPRA-2 | 226 |
| 147240 | 29 | 210 | hPTPRA-6 | 227 |
| 147244 | 30 | 648 | hPTPRA-3 | 4 |
| 147244 | 30 | 1152 | hPTPRA | 18 |
| 147244 | 30 | 616 | hPTPRA-4 | 20 |
| 147244 | 30 | 608 | hPTPR-5 | 21 |
| 147244 | 30 | 1143 | hPTPRA-1 | 225 |
| 147244 | 30 | 779 | hPTPRA-2 | 226 |
| 147244 | 30 | 460 | hPTPRA-6 | 227 |
| 147246 | 31 | 663 | hPTPRA-3 | 4 |
| 147246 | 31 | 1167 | hPTPRA | 18 |
| 147246 | 31 | 631 | hPTPRA-4 | 20 |
| 147246 | 31 | 623 | hPTPR-5 | 21 |
| 147246 | 31 | 1158 | hPTPRA-1 | 225 |
| 147246 | 31 | 794 | hPTPRA-2 | 226 |
| 147246 | 31 | 475 | hPTPRA-6 | 227 |
| 147247 | 32 | 706 | hPTPRA-3 | 4 |
| 147247 | 32 | 1210 | hPTPRA | 18 |
| 147247 | 32 | 674 | hPTPRA-4 | 20 |
| 147247 | 32 | 666 | hPTPR-5 | 21 |
| 147247 | 32 | 1201 | hPTPRA-1 | 225 |
| 147247 | 32 | 837 | hPTPRA-2 | 226 |
| 147247 | 32 | 518 | hPTPRA-6 | 227 |
| 147259 | 36 | 1818 | hPTPRA | 18 |
| 147259 | 36 | 1282 | hPTPRA-4 | 20 |
| 147259 | 36 | 1274 | hPTPR-5 | 21 |
| 147259 | 36 | 1809 | hPTPRA-1 | 225 |
| 147259 | 36 | 1445 | hPTPRA-2 | 226 |
| 147259 | 36 | 1126 | hPTPRA-6 | 227 |
| 147260 | 37 | 1338 | hPTPRA-3 | 4 |
| 147260 | 37 | 1842 | hPTPRA | 18 |
| 147260 | 37 | 1306 | hPTPRA-4 | 20 |
| 147260 | 37 | 1298 | hPTPR-5 | 21 |
| 147260 | 37 | 1833 | hPTPRA-1 | 225 |
| 147260 | 37 | 1469 | hPTPRA-2 | 226 |
| 147260 | 37 | 1150 | hPTPRA-6 | 227 |
| 147262 | 38 | 1382 | hPTPRA-3 | 4 |
| 147262 | 38 | 1886 | hPTPRA | 18 |
| 147262 | 38 | 1350 | hPTPRA-4 | 20 |
| 147262 | 38 | 1342 | hPTPR-5 | 21 |
| 147262 | 38 | 1877 | hPTPRA-1 | 225 |
| 147262 | 38 | 1513 | hPTPRA-2 | 226 |
| 147262 | 38 | 1194 | hPTPRA-6 | 227 |
| 147263 | 39 | 1460 | hPTPRA-3 | 4 |
| 147263 | 39 | 1964 | hPTPRA | 18 |
| 147263 | 39 | 1428 | hPTPRA-4 | 20 |
| 147263 | 39 | 1420 | hPTPR-5 | 21 |
| 147263 | 39 | 1955 | hPTPRA-1 | 225 |
| 147263 | 39 | 1591 | hPTPRA-2 | 226 |
| 147263 | 39 | 1272 | hPTPRA-6 | 227 |
| 147267 | 40 | 1680 | hPTPRA-3 | 4 |
| 147267 | 40 | 2184 | hPTPRA | 18 |
| 147267 | 40 | 1648 | hPTPRA-4 | 20 |
| 147267 | 40 | 1640 | hPTPR-5 | 21 |
| 147267 | 40 | 2175 | hPTPRA-1 | 225 |
| 147267 | 40 | 1811 | hPTPRA-2 | 226 |
| 147267 | 40 | 1492 | hPTPRA-6 | 227 |
| 147269 | 41 | 1824 | hPTPRA-3 | 4 |
| 147269 | 41 | 2328 | hPTPRA | 18 |
| 147269 | 41 | 1792 | hPTPRA-4 | 20 |
| 147269 | 41 | 1784 | hPTPR-5 | 21 |
| 147269 | 41 | 2319 | hPTPRA-1 | 225 |
| 147269 | 41 | 1955 | hPTPRA-2 | 226 |
| 147269 | 41 | 1636 | hPTPRA-6 | 227 |
| 147270 | 42 | 1908 | hPTPRA-3 | 4 |
| 147270 | 42 | 2412 | hPTPRA | 18 |
| 147270 | 42 | 1876 | hPTPRA-4 | 20 |
| 147270 | 42 | 1868 | hPTPR-5 | 21 |
| 147270 | 42 | 2403 | hPTPRA-1 | 225 |
| 147270 | 42 | 2039 | hPTPRA-2 | 226 |
| 147270 | 42 | 1720 | hPTPRA-6 | 227 |
| 147272 | 43 | 2007 | hPTPRA-3 | 4 |
| 147272 | 43 | 2511 | hPTPRA | 18 |
| 147272 | 43 | 1975 | hPTPRA-4 | 20 |
| 147272 | 43 | 1967 | hPTPR-5 | 21 |
| 147272 | 43 | 2502 | hPTPRA-1 | 225 |
| 147272 | 43 | 2138 | hPTPRA-2 | 226 |
| 147272 | 43 | 1819 | hPTPRA-6 | 227 |
| 147273 | 44 | 2045 | hPTPRA-3 | 4 |
| 147273 | 44 | 2549 | hPTPRA | 18 |
| 147273 | 44 | 2013 | hPTPRA-4 | 20 |
| 147273 | 44 | 2005 | hPTPR-5 | 21 |
| 147273 | 44 | 2540 | hPTPRA-1 | 225 |
| 147273 | 44 | 2176 | hPTPRA-2 | 226 |
| 147273 | 44 | 1857 | hPTPRA-6 | 227 |
| 147274 | 45 | 2104 | hPTPRA-3 | 4 |
| 147274 | 45 | 2608 | hPTPRA | 18 |
| 147274 | 45 | 2072 | hPTPRA-4 | 20 |
| 147274 | 45 | 2064 | hPTPR-5 | 21 |
| 147274 | 45 | 2599 | hPTPRA-1 | 225 |
| 147274 | 45 | 2235 | hPTPRA-2 | 226 |
| 147274 | 45 | 1916 | hPTPRA-6 | 227 |
| 147275 | 46 | 2109 | hPTPRA-3 | 4 |
| 147275 | 46 | 2613 | hPTPRA | 18 |
| 147275 | 46 | 2077 | hPTPRA-4 | 20 |
| 147275 | 46 | 2069 | hPTPR-5 | 21 |
| 147275 | 46 | 2604 | hPTPRA-1 | 225 |
| 147275 | 46 | 2240 | hPTPRA-2 | 226 |
| 147275 | 46 | 1921 | hPTPRA-6 | 227 |
| 147276 | 47 | 2119 | hPTPRA-3 | 4 |
| 147276 | 47 | 2623 | hPTPRA | 18 |
| 147276 | 47 | 2087 | hPTPRA-4 | 20 |
| 147276 | 47 | 2079 | hPTPR-5 | 21 |
| 147276 | 47 | 2614 | hPTPRA-1 | 225 |
| 147276 | 47 | 2250 | hPTPRA-2 | 226 |
| 147276 | 47 | 1931 | hPTPRA-6 | 227 |
| 147278 | 48 | 2175 | hPTPRA-3 | 4 |
| 147278 | 48 | 2679 | hPTPRA | 18 |
| 147278 | 48 | 2143 | hPTPRA-4 | 20 |
| 147278 | 48 | 2135 | hPTPR-5 | 21 |
| 147278 | 48 | 2670 | hPTPRA-1 | 225 |
| 147278 | 48 | 2306 | hPTPRA-2 | 226 |
| 147278 | 48 | 1987 | hPTPRA-6 | 227 |
| 147279 | 49 | 2209 | hPTPRA-3 | 4 |
| 147279 | 49 | 2713 | hPTPRA | 18 |
| 147279 | 49 | 2177 | hPTPRA-4 | 20 |
| 147279 | 49 | 2169 | hPTPR-5 | 21 |
| 147279 | 49 | 2704 | hPTPRA-1 | 225 |
| 147279 | 49 | 2340 | hPTPRA-2 | 226 |
| 147279 | 49 | 2021 | hPTPRA-6 | 227 |
| 147280 | 50 | 2214 | hPTPRA-3 | 4 |
| 147280 | 50 | 2718 | hPTPRA | 18 |
| 147280 | 50 | 2182 | hPTPRA-4 | 20 |
| 147280 | 50 | 2174 | hPTPR-5 | 21 |
| 147280 | 50 | 2709 | hPTPRA-1 | 225 |
| 147280 | 50 | 2345 | hPTPRA-2 | 226 |
| 147280 | 50 | 2026 | hPTPRA-6 | 227 |
| 147281 | 51 | 2223 | hPTPRA-3 | 4 |
| 147281 | 51 | 2727 | hPTPRA | 18 |
| 147281 | 51 | 2191 | hPTPRA-4 | 20 |
| 147281 | 51 | 2183 | hPTPR-5 | 21 |
| 147281 | 51 | 2718 | hPTPRA-1 | 225 |
| 147281 | 51 | 2354 | hPTPRA-2 | 226 |
| 147281 | 51 | 2035 | hPTPPA-6 | 227 |
| 147282 | 52 | 2256 | hPTPRA-3 | 4 |
| 147282 | 52 | 2760 | hPTPRA | 18 |
| 147282 | 52 | 2224 | hPTPRA-4 | 20 |
| 147282 | 52 | 2216 | hPTPR-5 | 21 |
| 147282 | 52 | 2751 | hPTPRA-1 | 225 |
| 147282 | 52 | 2387 | hPTPRA-2 | 226 |
| 147282 | 52 | 2068 | hPTPRA-6 | 227 |
| 147283 | 53 | 2478 | hPTPRA-3 | 4 |
| 147283 | 53 | 2982 | hPTPRA | 18 |
| 147283 | 53 | 2446 | hPTPRA-4 | 20 |
| 147283 | 53 | 2438 | hPTPR-5 | 21 |
| 147283 | 53 | 2973 | hPTPRA-1 | 225 |
| 147283 | 53 | 2609 | hPTPRA-2 | 226 |
| 147283 | 53 | 2290 | hPTPRA-6 | 227 |
| 147285 | 54 | 2579 | hPTPRA-3 | 4 |
| 147285 | 54 | 3083 | hPTPRA | 18 |
| 147285 | 54 | 2547 | hPTPRA-4 | 20 |
| 147285 | 54 | 2539 | hPTPR-5 | 21 |
| 147285 | 54 | 3074 | hPTPRA-1 | 225 |
| 147285 | 54 | 2710 | hPTPRA-2 | 226 |
| 147285 | 60 | 2391 | hPTPRA-6 | 227 |
| 147288 | 55 | 2688 | hPTPRA-3 | 4 |
| 147288 | 55 | 3192 | hPTPRA | 18 |
| 147288 | 55 | 2655 | hPTPRA-4 | 20 |
| 147288 | 55 | 3183 | hPTPRA-1 | 225 |
| 147288 | 55 | 2819 | hPTPRA-2 | 226 |
| 147291 | 56 | 2750 | hPTPRA-3 | 4 |
| 147291 | 56 | 3254 | hPTPRA | 18 |
| 147291 | 56 | 2717 | hPTPRA-4 | 20 |
| 147291 | 56 | 3245 | hPTPRA-1 | 225 |
| 147291 | 56 | 2881 | hPTPRA-2 | 226 |
| 147297 | 57 | 2947 | hPTPRA-3 | 4 |
| 147297 | 57 | 3451 | hPTPRA | 18 |
| 147297 | 57 | 3442 | hPTPRA-1 | 225 |
| 147297 | 57 | 3078 | hPTPRA-2 | 226 |
| 194483 | 58 | 20 | hPTPRA | 18 |
| 194484 | 59 | 470 | hPTPRA | 18 |
| 194484 | 59 | 461 | hPTPPA-1 | 225 |
| 194485 | 60 | 685 | hPTPRA | 18 |
| 194486 | 61 | 239 | hPTPRA-3 | 4 |
| 194486 | 61 | 716 | hPTPRA | 18 |
| 194486 | 61 | 207 | hPTPRA-4 | 20 |
| 194486 | 61 | 199 | hPTPR-5 | 21 |
| 194486 | 61 | 707 | hPTPPA-1 | 225 |
| 194486 | 61 | 370 | hPTPRA-2 | 226 |
| 194486 | 61 | 51 | hPTPRA-6 | 227 |
| 194487 | 62 | 586 | hPTPRA-3 | 4 |
| 194487 | 62 | 1063 | hPTPRA | 18 |
| 194487 | 62 | 554 | hPTPRA-4 | 20 |
| 194487 | 62 | 546 | hPTPR-5 | 21 |
| 194487 | 62 | 1054 | hPTPRA-1 | 225 |
| 194487 | 62 | 717 | hPTPRA-2 | 226 |
| 194487 | 62 | 398 | hPTPRA-6 | 227 |
| 194488 | 63 | 1522 | hPTPRA-3 | 4 |
| 194488 | 63 | 2026 | hPTPRA | 18 |
| 194488 | 63 | 1490 | hPTPRA-4 | 20 |
| 194488 | 63 | 1482 | hPTPR-5 | 21 |
| 194488 | 63 | 2017 | hPTPRA-1 | 225 |
| 194488 | 63 | 1653 | hPTPRA-2 | 226 |
| 194488 | 63 | 1334 | hPTPRA-6 | 227 |
| 194489 | 64 | 2590 | hPTPRA-3 | 4 |
| 194489 | 64 | 3094 | hPTPRA | 18 |
| 194489 | 64 | 2558 | hPTPRA-4 | 20 |
| 194489 | 64 | 3085 | hPTPRA-1 | 225 |
| 194489 | 64 | 2721 | hPTPRA-2 | 226 |
| 194489 | 64 | 2402 | hPTPRA-6 | 227 |
| 194490 | 65 | 2834 | hPTPRA-3 | 4 |
| 194490 | 65 | 3338 | hPTPRA | 18 |
| 194490 | 65 | 3329 | hPTPRA-1 | 225 |
| 194490 | 65 | 2965 | hPTPRA-2 | 226 |
| 194500 | 75 | 128 | hPTPRA-7 | 26 |
| 194505 | 80 | 49 | hPTPRA-4 | 20 |
| 194505 | 80 | 212 | hPTPRA-2 | 226 |
| 194506 | 81 | 624 | hPTPRA-3 | 4 |
| 194506 | 81 | 592 | hPTPRA-4 | 20 |
| 194506 | 81 | 584 | hPTPR-5 | 21 |
| 194506 | 81 | 755 | hPTPRA-2 | 226 |
| 194506 | 81 | 436 | hPTPRA-6 | 227 |
| 194507 | 82 | 113 | hPTPRA-3 | 4 |
| 194507 | 82 | 73 | hPTPR-5 | 21 |
| 194508 | 83 | 205 | hPTPRA-3 | 4 |
| 194508 | 83 | 165 | hPTPR-5 | 21 |
| 194514 | 89 | 64 | hPTPRA-2 | 226 |
| 194515 | 90 | 3043 | hPTPRA-3 | 4 |
| 194515 | 90 | 3547 | hPTPRA | 18 |
| 194515 | 90 | 3538 | hPTPRA-1 | 225 |
| 194515 | 90 | 3174 | hPTPRA-2 | 226 |
| 194517 | 92 | 778 | hPTPRA-3 | 4 |
| 194517 | 92 | 1282 | hPTPRA | 18 |
| 194517 | 92 | 738 | hPTPR-5 | 21 |
| 194517 | 92 | 197 | hPTPRA-7 | 26 |
| 194517 | 92 | 1273 | hPTPRA-1 | 225 |
| 194517 | 92 | 909 | hPTPRA-2 | 226 |
| 194517 | 92 | 590 | hPTPRA-6 | 227 |

### Example 19

[0313] Targeting of Individual Oligonucleotides to Specific Variants of Mouse PTPRA.

[0314] It is advantageous to selectively inhibit the expression of one or more variants of PTPRA. Consequently, in one embodiment of the present invention are oligonucleotides that selectively target, hybridize to, and specifically inhibit one or more, but fewer than all of the variants of mouse PTPRA. A summary of the target sites of the PTPRA main mRNA and variants is shown in Table 5 and includes GenBank accession number NM_{—}008980.1, representing mPTPRA-2, incorporated herein as SEQ ID NO: 11 and GenBank accession number BE372094.1, representing mPTPRA main mRNA, incorporated herein as SEQ ID NO: 102.

TABLE 5
Targeting of individual oligonucleotides to specific variants
of mouse PTPRA

| | OLIGO SEQ | | | VARIANT SEQ |
|---|---|---|---|---|
| ISIS # | ID NO. | TARGET SITE | VARIANT | ID NO. |
| 147237 | 103 | 17 | mPTPRA-2 | 11 |
| 147238 | 104 | 25 | mPTPRA-2 | 11 |
| 147254 | 113 | 876 | mPTPRA-2 | 11 |
| 147255 | 114 | 926 | mPTPRA-2 | 11 |
| 147257 | 115 | 1040 | mPTPRA-2 | 11 |
| 147258 | 116 | 1177 | mPTPRA-2 | 11 |
| 147261 | 117 | 1258 | mPTPRA-2 | 11 |
| 147264 | 118 | 1385 | mPTPRA-2 | 11 |
| 147265 | 119 | 1489 | mPTPRA-2 | 11 |
| 147266 | 120 | 1523 | mPTPRA-2 | 11 |
| 147268 | 121 | 1711 | mPTPRA-2 | 11 |
| 147271 | 122 | 1903 | mPTPRA-2 | 11 |
| 147277 | 123 | 2039 | mPTPPA-2 | 11 |
| 147284 | 124 | 2430 | mPTPRA-2 | 11 |
| 147286 | 125 | 2504 | mPTPRA-2 | 11 |
| 147287 | 126 | 2585 | mPTPRA-2 | 11 |
| 147289 | 127 | 2606 | mPTPRA-2 | 11 |
| 147290 | 128 | 2627 | mPTPRA-2 | 11 |
| 147292 | 129 | 2670 | mPTPRA-2 | 11 |
| 147293 | 130 | 2763 | mPTPRA-2 | 11 |
| 147294 | 131 | 2788 | mPTPRA-2 | 11 |
| 147295 | 132 | 2805 | mPTPPA-2 | 11 |
| 147296 | 133 | 2830 | mPTPRA-2 | 11 |
| 147298 | 134 | 2860 | mPTPRA-2 | 11 |
| 147299 | 135 | 2867 | mPTPRA-2 | 11 |
| 147300 | 136 | 2971 | mPTPRA-2 | 11 |
| 147301 | 137 | 3024 | mPTPRA-2 | 11 |
| 147302 | 138 | 3039 | mPTPRA-2 | 11 |
| 147314 | 150 | 633 | mPTPPA | 102 |

What is claimed is:

1. A compound 8 to 80 nucleobases in length targeted to a nucleic acid molecule encoding PTPRA, wherein said compound specifically hybridizes with said nucleic acid molecule encoding PTPRA and inhibits the expression of PTPRA.

2. The compound of claim 1 which is an antisense oligonucleotide.

3. The compound of claim 2 wherein the antisense oligonucleotide comprises at least one modified internucleoside linkage.

4. The compound of claim 3 wherein the modified internucleoside linkage is a phosphorothioate linkage.

5. The compound of claim 2 wherein the antisense oligonucleotide comprises at least one modified sugar moiety.

6. The compound of claim 5 wherein the modified sugar moiety is a 2′-O-methoxyethyl sugar moiety.

7. The compound of claim 2 wherein the antisense oligonucleotide comprises at least one modified nucleobase.

8. The compound of claim 7 wherein the modified nucleobase is a 5-methylcytosine.

9. The compound of claim 2 wherein the antisense oligonucleotide is a chimeric oligonucleotide.

10. A compound 8 to 80 nucleobases in length which specifically hybridizes with at least an 8-nucleobase portion of a preferred target region on a nucleic acid molecule encoding PTPRA.

11. A composition comprising the compound of claim 1 and a pharmaceutically acceptable carrier or diluent.

12. The composition of claim 11 further comprising a colloidal dispersion system.

13. The composition of claim 11 wherein the compound is an antisense oligonucleotide.

14. A method of inhibiting the expression of PTPRA in cells or tissues comprising contacting said cells or tissues with the compound of claim 1 so that expression of PTPRA is inhibited.

15. A method of treating an animal having a disease or condition associated with PTPRA comprising administering to said animal a therapeutically or prophylactically effective amount of the compound of claim 1 so that expression of PTPRA is inhibited.

16. A method of screening for an antisense compound, the method comprising the steps of:
a. contacting a preferred target region of a nucleic acid molecule encoding PTPRA with one or more candidate antisense compounds, said candidate antisense compounds comprising at least an 8-nucleobase portion which is complementary to said preferred target region, and
b. selecting for one or more candidate antisense compounds which inhibit the expression of a nucleic acid molecule encoding PTPRA.

17. The method of claim 15 wherein the disease or condition is a hyperproliferative disorder.

18. The method of claim 15 wherein the disease or condition is a metabolic disorder.

19. The compound of claim 1 targeted to a nucleic acid molecule encoding PTPRA, wherein said compound specifically hybridizes with and differentially inhibits the expression of a nucleic acid molecule encoding one of the variants of PTPRA relative to the remaining variants of PTPRA.

20. The compound of claim 19 targeted to a nucleic acid molecule encoding PTPRA, wherein said compound hybridizes with and specifically inhibits the expression of a nucleic acid molecule encoding a variant of PTPRA, wherein said variant is selected from the group comprising hPTPRA, hPTPRA-2, hPTPRA-3, hPTPRA-4, hPTPRA-5, hPTPRA-6, hPTPRA-7, hPTPRA-8, mPTPRA and mPTPRA-2.

The application's sequence listing, which the Patent Office published only in electronic form, follows.

SEQUENCE LISTING (227 sequences)

SEQ ID NO: 1 - DNA, 20 bp, Artificial Sequence
  Antisense Oligonucleotide
tccgtcatcgctcctcaggg

SEQ ID NO: 2 - DNA, 20 bp, Artificial Sequence
  Antisense Oligonucleotide
gtgcgcgcgagcccgaaatc

SEQ ID NO: 3 - DNA, 20 bp, Artificial Sequence
  Antisense Oligonucleotide
atgcattctgcccccaagga

SEQ ID NO: 4 - DNA, 3148 bp, H. sapiens
  CDS (219)...(2600)
gtgacacaactaaaaaaaaacaaaggtatttatggaattccactgagtggtaatggatgatgcagttcaaataactaaggacacatgttcaaagagcataattaactttttaaaagaagctagacttcttcagaagcttgccagtttttcaagctgatttctctcactggcaactcttcagagtgctgttcctactccaccctcccctggtgataagcatggattcctggttcattcttgttctgctcggcagtggtctgatatgtgtcagtgccaacaatgctaccacagttgcaccttctgtaggaattacaagattaattaactcatcaacggcagaaccagttaaagaagaggccaaaacttcaaatccaacttcttcactaacttctctttctgtggcaccaacattcagcccaaatataactctgggacccacctatttaaccactgtcaattcttcagactctgacaatgggaccacaagaacagcaagcaccaattctataggcattacaatttcaccaaatggaacgtggcttccagataaccagttcacggatgccagaacagaaccctgggaggggaattccagcaccgcagcaaccactccagaaactttccctccttcagatgagacaccaattattgcggtgatggtggccctgtcctctctgctagtgatcgtgtttattatcatagttttgtacatgttaaggtttaagaaatacaagcaagctgggagccattccaattctttccgcttatccaacggccgcactgaggatgtggagccccagagtgtgccacttctggccagatccccaagcaccaacaggaaatacccacccctgcccgtggacaagctggaagaggaaattaaccggagaatggcagacgacaataagctcttcagggaggaattcaacgctctccctgcatgtcctatccaggccacctgtgaggctgcttccaaggaggaaaacaaggaaaaaaatcgatatgtaaacatcttgccttatgaccactctagagtccacctgacaccggttgaaggggttccagattctgattacatcaatgcttcattcatcaacggttaccaagaaaagaacaaattcattgctgcacaaggaccaaaagaagaaacggtgaatgatttctggcggatgatctgggaacaaaacacagccaccatcgtcatggttaccaacctgaaggagagaaaggagtgcaagtgcgcccagtactggccagaccaaggctgctggacctatgggaatattcgggtgtctgtagaggatgtgactgtcctggtggactacacagtacggaagttctgcatccagcaggtgggcgacatgaccaacagaaagccacagcgcctcatcactcagttccactttaccagctggccagactttggggtgccttttaccccgatcggcatgctcaagttcctcaagaaggtgaaggcctgtaaccctcagtatgcaggggccatcgtggtccactgcagtgcaggtgtagggcgtacaggtacctttgtcgtcattgatgccatgctggacatgatgcatacagaacggaaggtggacgtgtatggctttgtgagccggatccgggcacagcgctgccagatggtgcaaaccgatatgcagtatgtcttcatataccaagcccttctggagcattatctctatggagatacagaactggaagtgacctctctagaaacccacctgcagaaaatttacaacaaaatcccagggaccagcaacaatggattagaggaggagtttaagaagttaacatcaatcaaaatccagaatgacaagatgcggactggaaaccttccagccaacatgaagaagaaccgtgttttacagatcattccatatgaattcaacagagtgatcattccagttaagcggggcgaagagaatacagactatgtgaacgcatcctttattgatggctaccggcagaaggactcctatatcgccagccagggccctcttctccacacaattgaggacttctggcgaatgatctgggagtggaaatcctgctctatcgtgatgctaacagaactggaggagagaggccaggagaagtgtgcccagtactggccatctgatggactggtgtcctatggagatattacagtggaactgaagaaggaggaggaatgtgagagctacaccgtccgagacctcctggtcaccaacaccagggagaataagagccggcagatccggcagttccacttccatggctggcctgaagtgggcatccccagtgacggaaagggcatgatcagcatcatcgccgccgtgcagaagcagcagcagcagtcagggaaccaccccatcaccgtgcactgcagcgccggggcaggaaggacggggaccttctgtgccctgagcaccgtcctggagcgtgtgaaagcagaggggattttggatgtcttccagactgtcaagagcctgcggctacagaggccacacatggtccagacactggaacagtatgagttctgctacaaggtggtgcaggagtatattgatgcattctcagattatgccaacttcaagtaagcggcaacaagggtccgtggaccaggaggattgcctttaatattttgtaatattctgttttgttaatataccccaaattgtgtatatatcttataactgttttagaaattggtacataggcttctattacctattaggtggaaattttatatgtaaatgtgttagcactgatagtcctttttccaatgttttattggggaattaaatagtgtgatgtttggattgatatcgtgaaatcctcagccgagaaattgggctggattgtgctttggttaatacatctttccctaaagaagataaacacaaaatccattccaggtagctcggcaccaactaagaaaaaaagcacaaagttctcagagctctcgaggaaagtggttgtccccgtaccaccatgcactgtaaatatccctcccctctctccctggtcccctcccccatccccaccactgatatcatggggagtaataggaccagagcggtatctctggcaccacactagggactatcaggtaataaaagctttgactccctgaaaaaaaaaaaaa

SEQ ID NO: 5 - DNA, 25 bp, Artificial Sequence
  PCR Primer
ggtggactacacagtacggaagttc

SEQ ID NO: 6 - DNA, 19 bp, Artificial Sequence
  PCR Primer
gatgaggcgctgtggcttt

SEQ ID NO: 7 - DNA, 22 bp, Artificial Sequence
  PCR Probe
catccagcaggtgggcgacatg

SEQ ID NO: 8 - DNA, 19 bp, Artificial Sequence
  PCR Primer
gaaggtgaaggtcggagtc

SEQ ID NO: 9 - DNA, 20 bp, Artificial Sequence
  PCR Primer
gaagatggtgatgggatttc

SEQ ID NO: 10 - DNA, 20 bp, Artificial Sequence
  PCR Probe
caagcttcccgttctcagcc

SEQ ID NO: 11 - DNA, 3070 bp, M. musculus
  CDS (26)...(2515)
ccgcccagcgccgggctcggtcagcatggattcctggttcattcttgtcctgtttggcagtggtctaatacatgttagtgccaacaatgctactacagtttcaccttctttaggaacgacaagattaattaaaacatcaacaacagaattggctaaggaagagaataaaacctcaaattcaacctcttcagtaatttctctttctgtggcaccaacattcagcccaaacctgactctggagcccacctatgtgactactgttaattcttcacactctgacaatgggaccaggagggcagccagcacggaatctggaggcactaccatttccccgaacggaagctggcttattgagaaccagttcacggatgccataacagaaccctgggaggggaactccagcactgcagcaaccactccagaaaccttccccccggcagatgagacaccaattattgcggtgatggtggccctgtcctctctgctagtaatcgtgtttattatcatagttctgtacatgttaaggtttaagaaatacaagcaagctgggagtcattccaactctttccgcctgtcaaatggccgcacggaggatgtggagccccaaagtgtaccacttctggccaggtccccaagcaccaacaggaagtacccaccactgcctgtggacaagctggaagaggagattaaccggagaatggctgatgacaataagatcttcagagaagaattcaacgctctccctgcttgtcctatccaggccacctgtgaggctgcctccaaggaagaaaacaaggaaaaaaaccgctatgtaaacatcctgccctttctctctttagctgtgagcaaggatgcagtgaaagcactgaacaaaaccactccattgttagaaagaaggtttattgggaaatcaaactccagaggctgtctctcagatgaccactctagagtgcacctgacacctgttgaaggggtcccagattctgattacatcaacgcttcattcattaatggctaccaggaaaagaacaaattcatcgctgcacaaggaccaaaagaagaaacagtgaatgacttctggagaatgatatgggaacaaaacacagctactattgtcatggtgaccaacctgaaggagagaaaggagtgtaaatgtgcccaatactggccagaccaaggctgctggacctatgggaatgtccgtgtgtctgtcgaggatgtgactgttctggtggactacacagtacggaaattctgcatccagcaggtgggcgacgtgaccaacaggaaaccacagcgcctcatcactcagttccacttcaccagctggccagactttggggtgcctttcaccccaattggcatgctcaagttcctcaagaaggtgaaggcctgtaaccctcagtacgcaggggctatcgtggtccactgcagtgcaggtgtagggcgcactggcacctttgttgtcatcgatgccatgctggacatgatgcattcggaacgcaaagtggatgtatacgggtttgtgagccggatccgggcccagcgctgccagatggtacagacagacatgcagtacgtcttcatataccaggcccttctggagcattatctgtatggggacacagaactggaagtgacttctctagaaacccacctacaaaaaatttataacaagatcccagggacgagcaacaacgggttagaggaggagtttaagaaattaacttcaatcaaaatccagaatgacaagatgcgcacgggaaaccttccagccaacatgaagaagaaccgggttttacagatcattccatatgaatttaacagagtgatcattccagtcaaacgaggcgaagagaacacagactatgtgaacgcatccttcattgatggataccggcagaaagactcctacattgccagccagggccctcttctccacacgattgaggacttctggcgaatgatctgggagtggaagtcctgttctatcgtaatgctgacagaactggaagagagaggccaggagaagtgtgcccagtactggccatctgatggcctggtgtcctatggagacatcacagttgagctgaagaaggaggaggaatgtgaaagctacactgtccgagacctcctggtcaccaacaccagggagaacaagagtcggcaaatccggcagttccacttccacggctggcctgaggtgggcatccccagcgacggcaagggcatgatcaacatcattgcagcagtgcagaagcagcagcagcagtcggggaaccatcccatcactgtgcactgcagtgccggggcaggacggacaggaaccttctgtgccttgagcacagtcctggaacgtgtgaaagcagaaggaattttagatgtcttccaaactgtcaagagcctgcggctgcagaggccacacatggtccagacactggaacagtatgaattctgctacaaggtggtacaggagtacattgacgccttttcagattatgccaacttcaagtgacaggtgacaaggcccacagacaggagaattgcctttaatattttgtaatattctgtttttgttaatatacccaaaattgtatatatcttataactgttttagaaatggcacataggcttctattacctgttaggtggagattttgtatgtaaatgtgttagcactgatagtccttttccagtgttttattgggaaattaaatagtgtgatatttgggttgatataatgaaatcctcagcctggaaactgggccagattgttccttgcttcaaatatcttttcctaaagaagataaacctaagactcattccaggtagctcagtgccaactaaaacaaagcacaaagttctcagagctcttgaggaaatggttgtctccctgtccccaggcaggcctcttcccctccctgtcctgtaaatatccctcccctctccagtccaccctcatctcccaccaagatcagccacctcaggcatggggagtaatgagaccagagcgcctctctggcaccacagcagggatcgtcaggtaataaacactcttgattccctgagg

SEQ ID NO: 12 - DNA, 25 bp, Artificial Sequence
  PCR Primer
gatataatgaaatcctcagcctgga

SEQ ID NO: 13 - DNA, 31 bp, Artificial Sequence
  PCR Primer
gaatgagtcttaggtttatcttctttaggaa

SEQ ID NO: 14 - DNA, 27 bp, Artificial Sequence
  PCR Probe
tgggccagattgttccttgcttcaaat

SEQ ID NO: 15 - DNA, 20 bp, Artificial Sequence
  PCR Primer
ggcaaattcaacggcacagt

SEQ ID NO: 16 - DNA, 20 bp, Artificial Sequence
  PCR Primer
gggtctcgctcctggaagat

SEQ ID NO: 17 - DNA, 27 bp, Artificial Sequence
  PCR Probe
aaggccgagaatgggaagcttgtcatc

SEQ ID NO: 18 - DNA, 3615 bp, H. sapiens
  CDS (696)...(3104)
gaattcgggggagtaagagacacgctcaggggagcaggtaccccttctcctaaagatgaagaggagcaaactggcactaagcaaggccatcgagagcggggacactgacctggtgttcacggtgttgctgcacctgaagaacgagctgaaccgaggagattttttcatgacccttcggaatcagcccatggccctcagtttgtaccgacagttctgtaagcatcaggagctagagacgctgaaggacctttacaatcaggatgacaatcaccaggaattgggcagcttccacatccgagccagctatgctgcagaagagcgtattgaggggcgagtagcagctctgcagacagccgccgatgccttctacaaggccaagaatgagtttgcagccaaggctacagaggatcaaatgcggctcctacggctgcagcggcgcctagaagacgagctggggggccagttcctagacctgtctctacatgacacagttaccaccctcattcttggcggtcacaacaagcgtgcagagcagctggcacgtgacttccgcatccctgacaagaggtgacacaactaaaaaaaaacaaaggtatttatggaattccactgagtggtaatggatgatgcagttcaaataactaaggacacatgttcaaagagcataattaactttttaaaagaagctaacaagcatggattcctggttcattcttgttctgctcggcagtggtctgatatgtgtcagtgccaacaatgctaccacagttgcaccttctgtaggaattacaagattaattaactcatcaacggcagaaccagttaaagaagaggccaaaacttcaaatccaacttcttcactaacttctctttctgtggcaccaacattcagcccaaatataactctgggacccacctatttaaccactgtcaattcttcagactctgacaatgggaccacaagaacagcaagcaccaattctataggcattacaatttcaccaaatggaacgtggcttccagataaccagttcacggatgccagaacagaaccctgggaggggaattccagcaccgcagcaaccactccagaaactttccctccttcaggtaattctgactcgaaggacagaagagatgagacaccaattattgcggtgatggtggccctgtcctctctgctagtgatcgtgtttattatcatagttttgtacatgttaaggtttaagaaatacaagcaagctgggagccattccaattctttccgcttatccaacggccgcactgaggatgtggagccccagagtgtgccacttctggccagatccccaagcaccaacaggaaatacccacccctgcccgtggacaagctggaagaggaaattaaccggagaatggcagacgacaataagctcttcagggaggaattcaacgctctccctgcatgtcctatccaggccacctgtgaggctgcttccaaggaggaaaacaaggaaaaaaatcgatatgtaaacatcttgccttatgaccactctagagtccacctgacaccggttgaaggggttccagattctgattacatcaatgcttcattcatcaacggttaccaagaaaagaacaaattcattgctgcacaaggaccaaaagaagaaacggtgaatgatttctggcggatgatctgggaacaaaacacagccaccatcgtcatggttaccaacctgaaggagagaaaggagtgcaagtgcgcccagtactggccagaccaaggctgctggacctatgggaatattcgggtgtctgtagaggatgtgactgtcctggtggactacacagtacggaagttctgcatccagcaggtgggcgacatgaccaacagaaagccacagcgcctcatcactcagttccactttaccagctggccagactttggggtgccttttaccccgatcggcatgctcaagttcctcaagaaggtgaaggcctgtaaccctcagtatgcaggggccatcgtggtccactgcagtgcaggtgtagggcgtacaggtacctttgtcgtcattgatgccatgctggacatgatgcatacagaacggaaggtggacgtgtatggctttgtgagccggatccgggcacagcgctgccagatggtgcaaaccgatatgcagtatgtcttcatataccaagcccttctggagcattatctctatggagatacagaactggaagtgacctctctagaaacccacctgcagaaaatttacaacaaaatcccagggaccagcaacaatggattagaggaggagtttaagaagttaacatcaatcaaaatccagaatgacaagatgcggactggaaaccttccagccaacatgaagaagaaccgtgttttacagatcattccatatgaattcaacagagtgatcattccagttaagcggggcgaagagaatacagactatgtgaacgcatcctttattgatggctaccggcagaaggactcctatatcgccagccagggccctcttctccacacaattgaggacttctggcgaatgatctgggagtggaaatcctgctctatcgtgatgctaacagaactggaggagagaggccaggagaagtgtgcccagtactggccatctgatggactggtgtcctatggagatattacagtggaactgaagaaggaggaggaatgtgagagctacaccgtccgagacctcctggtcaccaacaccagggagaataagagccggcagatccggcagttccacttccatggctggcctgaagtgggcatccccagtgacggaaagggcatgatcagcatcatcgccgccgtgcagaagcagcagcagcagtcagggaaccaccccatcaccgtgcactgcagcgccggggcaggaaggacggggaccttctgtgccctgagcaccgtcctggagcgtgtgaaagcagaggggattttggatgtcttccagactgtcaagagcctgcggctacagaggccacacatggtccagacactggaacagtatgagttctgctacaaggtggtgcaggagtatattgatgcattctcagattatgccaacttcaagtaagcggcaacaagggtccgtggaccaggaggattgcctttaatattttgtaatattctgttttgttaatataccccaaattgtgtatatatcttataactgttttagaaattggtacataggcttctattacctattaggtggaaattttatatgtaaatgtgttagcactgatagtcctttttccaatgttttattggggaattaaatagtgtgatgtttggattgatatcgtgaaatcctcagccgagaaattgggctggattgcgctttggttaatacatctttccctaaagaagataaacacaaaatccattccaggtagctcggcaccaactaagaaaaaaagcacaaagttctcagagctctcgaggaaagtggttgtccccgtaccaccatgcactgtaaatatccctcccctctctccctggtcccctcccccatccccaccactgatatcatggggagtaataggaccagagcggtatctctggcaccacactagcccgaattc

SEQ ID NO: 19 - DNA, 186739 bp, Homo sapiens
cagctcctccaacccagcttatttgaaccacaacccagaatggttaggggccagatgtgggagtgttctctgtcatgatgccctggctctggactgctccccaccagaaagagagccagaaggcggacgagtacctgcgggagatccaggagctgggccagctgacccaggccgtgcagcagtgcattgaggctgcaggacatgagcaccagccagacatgcagaagagtctgctcagggttggcctggatggccgggccggggagggtggggctgggagggggtgggatgggcagcagggaagctctctcctatcgccctctggctcttctcaggccgcctccttcggaaagtgtttcctggacagatttccacccgacagcttcgtgcacatgtgtcaggacctgcgtgtgctcaatgctgttcgggactatcacatcgggatcccgctcacctatagccagtatccctgtgcacgccagaagggtaccctacagccaggggtggcaggggaaggggctggagatgcgtctgcaggtacctggcaagcggggcttattctccaactggatccttaaccgaggaaaatacagatataagcagctcaccatccaggtgctgctggacaggtagggtaagcccaagggtgcagtgagcgggctgtcaggggggtgggcattacagccttgggtggggtcttatggtcactgctcctgacctatctaggatgtgggaggcctgatgtgcaggctgaggccactctgctccctttctcctccacctcactccttgtatcctttacccaccgggtctaccaggctcgtgttgcggagactttaccccctggccatccagatatgcgagtacttgcgccttcctgaagtacagggcgtcagcaggatcctggcccactgggcctgctacaaggcaaggatgtgggatggggtccaagggcatttagaggattccaggccctggtgaggtggaggaaatagaaagtgtagaactgcgctgggcacggtggctcatgcctgtaatcccaacactttgggaggctgaggcgggcgaatcacctgaggtcaggtattcgagactagcctggctaacatggtgaaaccccgtctctactaaaaatacaaaattagccgggcacggtggcgcatgcctgtaatcccagctacccgggaggctgaggcaggagaattgctttcacctgggaggcagaggttgcagtgagctgagattgcactgctgcactccagcctgggcgacagagcaagactctgtctcaaaaaaaaagaaagaagtggcgggggcggaggaggagggaaagagagagaaagaagaaagagagaaagaaagaaagaagaaggaagggagggaggaagggaactgaaggggtgggtcctaagggcttgcaggagtggagagtgaggaatggcatccagatgtttgtgacaccccgcatcccttgcaggtgcaacagaaggatgtctcagatgaggatgtggctcgagccattaaccagaagctgggggacacgcctggtgtctcttactccgacattgctgcacgagcctatggttgtggccgcacggagctggccatcaaggtgtgggtgcccagccctccacagacactctgatgtggttgttcagggcccccatgccagctccttctctctgtgccttccttctcacctcacagctgctggagtatgagccacgctcaggggagcaggtaccccttctcctaaagatgaagaggagcaaactggcactaagcaaggccatcgagagcggggacactgacctgggtgagggcaaggctggggggcccctgggctaagtgggagcctggctggaattcccactccaccttactctcctgcagtgttcacggtgttgctgcacctgaagaacgagctgaaccgaggagattttttcatgacccttcggaatcagcccatggccctcagtttgtaccgacaggtgtgtgtagtgggcagggttgtggtgtagccttctgagcacttgagttggccttgctgactgattgcctgcctgtggccccagttctgtaagcatcaggagctagagacgctgaaggacctttacaatcaggatgacaatcaccaggaattgggcagcttccacatccgagccagctatgctgcagaagaggtctgagatccatggggcgtgtggggcgtgtggggcatgtgggctggggctgttggtccggttccttcaggaatctaggccttcgtgttgggtgcacactccatctggtcctcactgtgagggagactctgacgtgaggccaggatgggggttagtgtcagaggagctagccatccctctaggacatcagagtggtgcacctagcaggcaaggctgaccctggcgaccctgggcacagggatgggggagaagactgtagcctgggtgaggagggcgagggtcctgcatgctgtgagttcaggccttccttcttgtctttatagcgtattgaggggcgagtagcagctctgcagacagccgccgatgccttctacaaggccaagaatgagtttgcagccaaggtttggcccacctttttccaagagcctcctcgtctcctggtcttccctcctggtccctcatccccatcatgcctcattatccgggtccccaggctacagaggatcaaatgcggctcctacggctgcagcggcgcctagaagacgagctggggggccagttcctagacctgtctctacatgacacagttaccaccctcattcttggcggtcacaacaagcgtgcagagcagctggcacgtgacttccgcatccctgacaagaggtaggtgagggcccaggctgcatgtgggtcccaggaccacctgcctctcctgcaacacctccaagcccagctttcctgcaggctctggtggctgaagctgactgccctggcagatttggaagattgggaagagctagagaagttttccaagagcaagaaatcacccattggctacctggtgaggcagggtcctccctccagcccacttccagtgagggtagtcttcgggagagagggctaggcagggagacagataggatggcccgttcatgctcctgttcagctgcccgcatagttagcgagtgcttcctgtatacacatttgtgggcaggcatcatctgctgtgttgggtgcactggaggatgggtccaagtttgcctgcagatgttacggggagagagaatgagctgctttccccagggagggccacagggggcactatgtgctagagggaaagtcttgtctgaggagggtggagggggcacagggagggtgcatatgggaggcagtggagatactgagggctgttttctgtggtgggtagttcagaggtgtatagggcaggtttgagaatgtcaatcacaagagaacacaggaaatgtgagggctggtggcaggaacgcctgttgcaaggggtaatggtgggtggtagagcagaagcgtggaaataattggtctcaagtctctgacagagctttggtttaggtgatttctgccctaagaatgttgagatcacaactgtctgtgcatgggggttgggggattatatgtactgacgggtgtatacatatagaatatatatggacgatgtatgcattgcgcctctgctcgtaagagagaggacaggagggctgtgcattaccttctccctccacccgcttcctctcctccaagccttttgtggagatctgcatgaaacaacataacaaatacgaagccaagaagtatgcttcccgcgtgggtcccgagcagaaggtcaaggctttgcttcttgttgggtgcgtcaactgagggcctgtgggtgctgggtggctgagctgtgggctggtgagaggcagggtttgtgcccttgagcagccccaacaccacctcctctcttgctcaaaccacagcgatgtggctcaggctgcagatgtggccatcgaacaccggaatgaggctgagctgagcctcgtattgtcccactgcacgggagccacagatggggccacagctgacaagattcaacgggccagggcacaagcccagaagaagtgaggagtccatcctgtacatctcaagcaaggggttcctcccctagcacctgggcttggcagaagggccatagttcatccagctcctcccctagagcaatgctgaggagcgggggcatggtagcagggctgtctggttttaaataaagttggaacacttcacagtgcttgtcttacacagtccagcctaagcaaaggcaagctcaagacaggatcctccagacaccacagcaaaactccatgtgttccgttgtgttgggaccggaggtgggggcttctccagccatactcgcaagaaacgtgtcctctccacagttaccaaggaaagctttctctatctcacagctcctaggaagattatagggagagatggcacaaaacttaagcaccagctcaccaagaacatactgtaaagcattctgtgtgtgtgcgtgtaaacacgcaagaaccacgctaaacacttttgctgcctgtacttcctttattcctcgtgacagccctgtgaggtaacatcaccccactttacagaaaggagattgaggaccagggagttcgataataacaaatatgtggcaaaacagggatttgaaaccccgggccaagtgcaagctggaactggaatcgggccctctgtgagaagggagcctgaggcaaggccccaatttgcactgcagtggtgattggaggactaatgagaagtgtgtggcctgcgggccataggggtcagggggtggtggcctttggaactcttgcccactgaactgtggtgagcaattccaagttgtctctgggccaaatagagaaggaggatggaagatttcaattctgccaaaaagaaccatgaacaccagacccgcaatcagtaggagtacccgcggggccctctgctctctctatctagccttccgttggcactccagtgcaccccctctgctctccctgtctagccctccgttggcactccagtgcaccccctctgctctccctatctagccttcccttggcactccagtgcaccttggcttcatgcccagggccccacccaacactgagggcattgccttttcctttgtcgcccccactttgtctacaaggaggaaaccacagccagagggagtgcaggcctcactggagcttcaggcctctccctatttaacacccctagggccgaccatgcttttagaaagacagtgagagactcagggcctgagaaggtatttctttttttccttttcctacctgacttgtaaatgaaagtttgtgaaagtccttcaaggagatataagtcaaatggtaaaataactatcatgctcgccattcattatgtgggtcaagaatttggacaggttgtaacagggatggtttgtgtctgtttcatagtgtctgaggcatcagctggaagactaaaaggttgatagctaggggctgaaatcatgtgaaagcttgctaactcacacacttggtgagtgacgctggttcttcactgggaccttagctggggtggtctgccagaacacctgcaacatggtggctgggtcccaaggacaagcatcccaagagggtgccaggtagaatctggactgccttcctaacctagatttggaagttacgtggtgtcacatctgctagagtatttgtcacagcagtaatacaggcccaccccaccaatttcaaggggaaatagactccacctcttttttttttttttttttttgcgtggtagagatggggtctcgggggtctccttatgttgcccaagctggttttaaactcctgagctcaagcagtcctccctcctcagcatctcaaagtgctggggttacagcatgaaccactgaacctggcctggactccacctcctgatagggagtagcaaagttctggaaatactgtggctaggttttggaatcacaatctggcacagcccatcagctttcccttttggaatcagcagacaagaggaaaggaaataatccccaatgctgggctcatcattctgggcttttttttttttttttttttttttttttttgtccccagtcttggccccacaattcctcactgccctggtagctctttgatgcctttaaaaaatgttttcccagcttttcgagttctcaatgaaaaaggattgctatcaaacaacccagttttcctctctggaaagggaggcttgaccagtgcttttagaatgtacacaatacaaaacccacatctccaaagtaacatacagtatatttactcataggctatgtaaacaaacactgtacatatgaagttttagaaatatgtgagaaataacttttaactgatgacaaatgtatatcaacagtgatttcaactttataaaaggtgtgtgtgcatgtagagaagcattggaattgtctatggggagagttgctttaaaaaggcagttttgtatacttttttgtaaagttaatcactgatttgccccccacctccacagtttattataaaaactttcaaacatacagccaggtagaaataattttacagtgaacatttgtgtaactaccactggattctaccattagcatcttactatatcacacatctgttcatctatccattcctctatgtcaatccatcgtatttttcatatatttcaaagtaagttgcagacatcagtacacctccccctaaatacttcagtatgcatttcaataactagagttcatttttggtttgcaattttttttttcttttcaggcaaaatctacatacattgcaatccacagatcttaaatgtaattttctaagttttgacagatgtataagcctatgaattgtgacatttaaaaaccagaactgggattttcttttttcaaatccttgcttactcaattgaaattagtgtgagatgccttctgccctgagcagtttgtacagcaggcctatgcctacatgggtgggcagggccaagtttcgtccaatgtatgacgctaggattggggctaggaactaggactgtgtagctggaggcaaagaatctgggaacatttcttcttgtatcagtggtagccagtgcagggagaatcagggcaaaggctgggcgcagtggctcatgcctgtaattccagcactttgggaggcttaggtgggtggatcacctggggtcaggagtttgagaccagcctggccaacatggtgaaaccctgtctctagtaaaaatacaaaaaaattagctgggggtggtggcgggtcctgtaatcccagctacttgggaggctgaggcaggagaatcgcttgattgcttgaacccaggaggtggaggttgcagtgagctgaaatggcgccattgcactccagcctgggcaatgagtgaaactctgtcttaaaaatatatatatatatatcgagcaaaggctcctacaactcaccttctcagggtaaggggctgtatgtccagtctcttagatacaaagttccagtgaaagactcttggggttggccaggcgcagtggttcacccctgtaatcccagcattttgggaggctgaggcaggcagatcgcctgaggtcaggagttcaagaccagcctggccaacatggtgaaaccctgtctctactaaaaatacaaaattagccaggcgtggtggcgcatgcctgtaatcccagctactcgggaggctgaggcaggagaatcgcttgaacccgggaggcagaggttgcagtgagccgagatcgtgccattgcactcaagcctgggcaacaagagcaaaaactccgtctcaaaaaaaagaaaaaaaaaactcgggtttgaacagtgtggcctgcaaagggacttggctctcatttacttcacctttctatcttattgccttgctttattttcatttcagcatttaggaaattttcttgttcttttgtttattgtctgtgttcctatccagaatgtaagctcctgagagcagaggcctcttctgtcctcttctgtcttattccctgctgtgtccagcacatggtctgcactcaataagtatttgttgcgagaatgactcattgttccatttactagaaggggaaaggaggccccgagaggggaaatgacttgcctaaagaaacaggagtcctttccccccatcctccagctctcctgatcctctcctttgctcataaaccctgtgactgttggggcacctgtggggtggctgcgaaatgcctacctgtaggtatgtgctcctgtgggttgggactaatgcaggactaggagtaggagggctctgcagtcccccatttgggtaggcttgggcacaggaaactgcctcctttcccttcctcagttctcttctcttccaggataaccctttactctgtgatgatgatgggcgagggagctcaggacactctgggagccaagtaggatggagggctgggcaggtctctacaggcaggcagctgaggagggggctctgtcttcttccaatggaaacagcatctgtgtggttgctgagctgaaccctccttcccagggtctccagggtctgtagttctccttggtctgtagttctgtcacccctgtgcacaccccacaaatgctttgaccatagtgcagctgtctcatggggagagaaagaactttcatttcctgagaatgggttacttgccaagctgaacatgcctaattctcaatacagccctgggaagttccaggaagagttgcagagggaggctcaggtcacccagcacatggtggggctggaaaccccgggctctttgactaccacgcccaacaacaatttttccaagtgtggtcatatccaaaaggggtccttcagataatctcaaagatgaacacttactgcaatcactatttcagttatattaaaaatataagtagcatgtcaaccccttctagggtaatacaaataaaaagtaaaaaaaaactaatcaacaaaaagaaacatattaagaaataatagtgtaaattagatataaggcaaaagtaagctggtggggtttggttctagagcatagggctgctatcccagctactgaggtacctcctgcgtttgcagtcattacttgttaggggttttcacactttgacttcctgcttttcacttttccattcggtgttgcgggatagattgagtttggacttaaggggatatgtgaatgttgggcgtggggaaggatccaccctcactggggtctgagcgttaggagagtaggcgtgtggactctgggcctttgggctggagtgtctattggtcagaggtgtcgggttcggccatttcaccctcacctctaggctggccctgctgagagggagagagagtcacaactcccactcaaggagagacttccctgctggggaggggacggcctgaggcccgccccacccatattcccaggccctggctctggttagcatggactaacttattccacaatacggaggagtggggcacagagtccctaactggcgccccaacagaaggcggtggtggggaccggagatggtaggactggagatggtaggggctgctgatgtgagcccacaatacggaggagtggggcacagagtccctaactggcgccccaacagaaggcggtggtggggaccggagatggtaggactggagatggtgggggctgctgggagccccttttgcgccgcagtgtttcctgccatgaagagttgccgccggtcacaacccttccccgggggcgccccgaatgtgggactccttccggcctggggtgcgtgagggggactcaggggttgcccggtctggaggagagactcgccgccacctaccccgggaaccgcagactctgggtctgggataaagcgtcccctacccgcaagctcggtttgtgcgctactgtgcaatctgtcttttgcctgcagacgcccagccgctcgccctgcgcgggtctcggaatgtccaggggtccctactggggatcacaacccggcgaaatgtcgcatttgccaccacctatctcgactgcgtaatcggctttcagccgcagacgctcaggtcctgcagcacccgcggggatccgtgtaggaacctgctgccgctggatggactgagcgattgcttcgcgggtgtcacgcaccagacgccgtgccgggagcgccgggaagggggtacgcgccccaaccccggccgggggagggcgcactctggctcctctctgcgttttgagcctcccctcccccgccaggcgtatcgcaaaaggcacctccatcgcagagcaccatgtgttgtgcttctactcagctcggtggcgagcggggccccagcatgcgcatctggaaagcgggggagattaccctggagctcgggtggggacggcgtgggctgacttgatataagacgacacccacggagccagatccgttctagggacttggcaggttcctctccctccccagtgagatccgtcgttctttgcagcaattaggggagggaaaaaaaagacccacagtatcacgtttggagagggttaggaagatggctctcgagttgcaggccgccctggtggctagacattggtgtagtttgtgcctggcctcggtttcctgatctgtaaactgggaagaaggcccaagtcatgaggcctgtgactgtagaatggctgaaggcactggtgcactcgcagccggtccttccggggtccagcttcccgaaggactgggcagccccggggcgaacccctctggagctaccaggagaacgtgcgaccgggttcggcgccccagccggcaagtgagcgcccagcggagcgcaagggcggggcccgcgcgggccggagacgcccgttcgctgtcggccaaccagcgcctgtctctgaacagccaatgaacacgcgtcttacagccaaggccgggtcgggagcgaggctgcggcgagtgcggcgctgacagagacgcgcgcgcgcgcgatcgcgctcggaccccggccgctgccgccatcactgtcgcccgcccagtcgcccctcagccgcttcccctcgccatggaggcgaggccgccgccgccgccgcggggctcggagccgcgggccgggcggcggccctgagggctagtggcggcccgaaacgccgccgcggagccgaggcggagccgctgtcctcgtccccagcggtcccgcccaacgcccgactctgtgagtgttcgcggccgctgcgcccgggtgggctccggaagggggagcggctcccgggggcggtgggaggggtcccgggccacagcccagagcccggagcccgaagccctaagccatcttttccgggtagaagcctgcgggcgcctgcaggttgattgtgcatccttgcgggtccgtcgcggggagggggtccccggaaacgtgccggcccgagtgccgacccctcgcgactgcccaggaactttgcatgcgtccttctgggaccaggccagggcactgccagagttgattctcagagaagaaacttagaacggcgagaacagaatttgctcaggtccatttaatgggaggaaagaggaaaactcttggcatgagaaaatttgcttttgcagtgaccaacttttctttcccttcaagtccacctccctcggtcccccggcccgtctcccaggcccctctccttgccgccctctcccaactgttgaggctgtttaagaagggaaataagggctgagagctgcccagaattcagaataggccaattgagaacgcaggtcccctccctttttactttcggtaaataaaaaattttttttgaaaaaattagttactaattatatctcctgaagattaaaaaaaaaaaatagcagagcagagtcctgtcttgagggtttcgtttttatttttgagatcactgatgatatttgtaagacaggaaaagaagaatgtgcaaatccaccctctgcagggtgaacgccatcagaagcctttgctcaggagagggattccggctctagaaccagtccacatcaccctggagatggcttcgtttgccacctgctagctgtgcaggcagcctgagaaacagaagatggtgggcgagaggaggactgactaggaaagggcgaacatcttcctgcctggccactcctttcagaaacagatctgatgctgtcacttgtttacttaaaaactccctcgcttttctttttcccatgggatgaatgaagcctaaaatgccttatcaggtcatacaaagcccttgacaatcttgcctcaatttactcctttacttttagcctaatcggatcctccaattctccttcccctcatcccgcttgctggctagtattcagagctgcttgactgccccctcacatgttgggatgtttttgttttatgtgatcctctttcttccccacctttacctgccaagctccactttttcttttaaagttcttctcatttgagaagcttcttgcgggcaggagctgtgtcttgcccacctttctatctcccgtggtgggagaatcctccaagttgtcttgtagattctttccaatctcttctctcttatgcctaggctctgtttatttcccggtatccacttcccaagagattttttcgtgttttgaaggcctgcttggagtacatgcccaggacttttagtatttctgattcccggcttccccatgtccatcccacccagcccccataagcagtcagcaggtgggaactggtaggtcccatatcccactggcctccaaaaaactgtctctgaaagactaaaagcccttcagtctcttttcacctctgcctgctcaaagtgacctggctgataccgtgcattgtaaggcatggtgggatcccggggcctgttctctgtttagccacttaacatctgggtgaaatacagaaccagaaaaaccacccctctgacttcagtacattcatgtgtcttccctttgccaggtgaattgcttgggatacaaaagtgaggaagtcagtccttaacctttgaggaactcagagtctaatgtaggacaggtggatataaatacatcacaggtgctataagattgtgataataataatagctattttttatttgccttgtgacaagctatgtaatgttttccatgaattccctcagtcttttcaacagtcataaaagggcttattcctactctacagggttggaaactgaggccaaacagtgggcaaatgagggaatagtcaagatttgaattttggccgtgtatttgcagagcctctgccaggctgtgtagggagcatcccctgcctgggtgatttgggaaagctttcctgggacgggggggccttcggatcatgaaggatgcataggagtttgcgcgtggtggactgcacacataggcaagagggagcagcacaagcaaacttggtggtggaaggaatccactgtccttggggaggagggaagaggttaatcatagctggatcaggtaaggacaatggagagctactagaggatttaaaggaggtcagggacttgggctgaaagaattttggaaagatcatttgggggcaatatagggccaaatgcagatgcccctgcaatataggaggcactggttgggtctgacagaggtagagtcacagcctcttagacccagaggaaggtgtagagagaatcctgctcaattttgggaaaagataattaatgcagatgagagaaaaattcaaaagttctagcaatacaaaagagtatatagagaaaaatgtccctcctaccctggccccaagtctcctgtctccctaacctcctccccagagatggctgaagttttcagtttatatggccttccatagacactgttgctttataaatatgtgcctgcttatccatactcctcccaccatgggacgtaccactcacaccttactgggtttttttacttaacatatttaggaaatcattctattatcaacatatatagagagttatttgttctttctgttgacatgcttttacttatttagttgtatggctgtactgtaacatctttgggttaaatatttgtttccaggttcttctcttacagcaatgaatgtccttgtacatactgtgttatgtgctcatttgcaaagttatctgaacaatatgcttttagaagtagaattactgggtcaagggatatgtctgcatttttgatttgcagacatggagccaaactgccacccgtttctggggggttgtaccaatttatcctctcccccaaagtgtatagctggatagatgatctttggagaattcaggaggatcaactacgatgctttttcagctattatatgcctacttttcctccacaaatcctcccccaccctatgcgattctagccagtttctttgaatttacagagggagatgttgaggctcagaaggataaaagtaacttgtgcaggatgatcagtgcgggtggtggtgggtgttttgttttgtatttttgcacccctcatgtttgtatttgccagcacctttcattggaggtgctcagtgtcagtttgtaaacattattgcattatttttctccattttcacatggaaaaaaatgagatgcaggggaagtttgagttatgagagggaaactggccaaatatagaatcttgtcattttacttccagtgcaataataaatgtttccaaatgacaaagctgaagagatgttttttgtttgtttgtttgtttgtttgttttttgagatggagttttgctcttgttgcccaggctggaatgcaatggcgctatcttggctcacgcaacttttgcctcctgggttcaagcgattctcctgcctcagcctcccgagtagctgggattacaggcatgtgtcactgtacctggctaattttgtatttttagtaaagacggggtttctccatgttggtaaggctggtcttgaactcctgacctcaggtgatccgctggtcttggcctcccaaagtcctgggattacaagcatgagccaccgtgcccggtgaagaaatggttttttagtgagtctgagtacaacaaaaatagcaataatataacactaacttaataaaactgaacagcaggcccaaaaatagcccaacattaaaatttattttaatgtattctctatggaaaagagaatccattaaatgtaaaactatttattttactctaaattcacatccatttgtgtcagtgtacaagacataatttttatagtagcagtcagtacatatagaatatgatttttgaattcttcaatagcataaaatattttatatttactcatttaagtatttgttcatttaaaatcacaggctgggtgcggtggctcacgcctgtaatcccagcactttgggaggctgaggcaggtggatcatgaggtcaagagatcaagaccatcctggccaacatggtgaaaccccatctctactaaaaatacaaaaattagctgggtgtggtggcgcgtgcctgtaatcccagctactcgggaggctgaggcatgagaatcacttgaacccaggaggcggaagttgcagtgagccaagatcttgccactgtactccagcctggcgacagagcgagactccgtctcaaaaaaaagaaaaaaaaaatcacagtatagtattccatgcatcgacagctgtagttttttttaaatttgtttttgtttttttgagacagggtctcactctgccaccctggctggagtgcagtggcatgatcacagctcactgcagccttgacctcctgggctaaatgatcttcccatctcagccacctgaatagctgggactgcacaggtctgtgccaccacgaccagctaatttttttattttttgtagagacatttttatgttgcccaggctagtcttgaactcctggactcaagtgatccacccgccttggcctcccaaagtgctgggattacaggtgtgagccaccactctcagccaacagctgtagttggtgcaatcctttttattcttttatttttttctacctttttgctattataaatggtacttttataccccttgttcaaatacttcttttggattatttccttggactcttactcccaacctgggctcaccaagtcagaggatacagtttcggtgcctaattgcaatctggaaaggttgaactagtttccagcactatcagcaatttatggggccatttcttgacaacccatctagtgctattacaaagaaatgtaatgataccttgaattaggtttaatttacattgctttggaaaaagagaccagtagctgatttagattttttgaaagaagtacagtgctgtgatatagattatctccaagatttatgtaactgaagccaacttgtggttgaagaaagatttggttgatgagattgaaatattgtggaagtttagaataggatcatagcagtataaaatataaggctagatgctgttcagttggaaataccaggcattgtgccggaagctggggacaccccagagtaacatagatgtgatgtctgtcctcatgacacttttaggttagtgcagtagacagacattaaaatcacctatggtaattatagatgtgatgaaaggggaagaatagggtgtcgggagtgtcagagaagttcagcagctaaacaacatttgcagttaaacatttgtgaaggccctgagctgagaagggatttggtagctcagggcagcgcttcgctaacttgaatgtgctcatgaaccatctgggaatcttgttaaaatgccaagtcctgaatcagtaggtttggggtgggacttgggattctgtgttactaaccagctcctgggtgaggcagatgctgctggtgggtggatcacacttggtgtagcaaggcctaattgagagcttggtgagcacctaaaactggctgaccatggtgagcaggaaggggcaggtggcttgcagtgacagagtaattctctgcctaggctgcactttagattcacctggggaacttagaaaaatcagggttgcaaatgccccacccgcagccattttaatttaattggtctcagttggggcctgagaatgtgtatacagtcatgcacagtataacgatgtttccatcaaggagagactgcatatgccacagtggtcccataagattataatccataattttactataccttttctatttttagatatgtttaaatacacaaatactcactgtgttagttacttacagtattcagtacagtaacatgctgtacaggtttgtagcctaggagcagtaggctatacaatatagcctagatacgtagcaagctgtaccatctcattttgtgtaagtaccttttatgatgtttgcagaattatgaaatcacatcaggactcatcctcagaatgtgttccattgttaagtgatgcatacctgtatatatattttaactccccaggtgattctaatgtgtagccaggcttgagaactagagactaaggacagtgttgagactagagaatggcaaggagcagagttgagggtcctgtatggcatgcaaggattttggactctatcctgaaggcagagctaaatctttgaaggatttttaagcaggagagtgaactgatctgatttgcaattgttaaaaagttcactgtggctgtagtccagagcagtagttttcaaattgaggtagataagatgatccaggggaactggaagaaaatttagaactttttattgtttttatctaaaagataagataaaacatttaatttaggaattgtctctggcatcttcttgggtctataggtcaaacagttaatgtgttaactgtagaactttgggtgtcctgaaggaagagactgaattctgcagtgagcagagacatatttatacatttgttctccatgtattgcaacatgttgttaacagtttatattaaccagttctcattgaactagcctttacaaaatggacatgcagagaaaccagtgatcaaagaaaatactaataatacaagcacaagcaaacaagttgtcagagctgacacttgtccaactcctgtgatgaattcttggtgagctattcaaataagtcagctcttactaaattggaaagtatcaggaaatttataagaaacatgaactttcgtgctctgtcattaataggaatcttgctttaagattccttttaatcgtatgtagaacccagctgcacggtggctcacacccataatcccactgttttgggagcctgaggtgcaggaggccaggagctcaagacaaacctgggcaacatagcgagaccccatctctaccaaaaataaaaaattagccgtgtggtgtcacgtgcctgtagtcccacttacttgggaggctgaggcagaggattgcttgaacccaggagttcaaggctgcattgagccatgattgcaccactgtactccagcctgggggacagagggagactctgtgtctcaaaaaaaaaaagaggaggaccgggcatagtgggtcacacctgtaatcccagcactttgggaggtcagggtgggtggatcacaaggtcaagagatcgagaccatcctggccaacacagtgaaaccccatctctactaaaaatacaagaattcgccgggcgtggtggcgtgtgcctctgggtaatttcagctactcgggaggctgaggcaggagaatcctctgagcccaggaggcggagtttgcagtgagccgagatctcgccactgcactcaagcctgggtgacagagcaagactctgtctccaaaaaaaaaaaagtatgtaaaaccttgagatattaaataataaaatatgaggctgtcaccagtatgaagacatttgaaaaccaaaaatttggaacataaaaagaacctctacattttttttgcagtgatgtttaaagataaaggatattccatcagatgctttacaaaattttgctaacttcaattattaaaatttatattttgagggttttttgcttttaagagacagggtctcactctgttgcccaggctggagtacagtggcacaatgatagctcactgcagcattgaactcctgggctcaagcgatcttcccaccttggccttccaaagctctgggactacacatgtgaaccaccatgcctggccagtttttaagtttattgttcttataaaagacaaaatggggccgggtgcagtggctcatgcatgtaatcccagcactttgggaggccgaagtggacggatcacttgaggtcaggagtttgaaaccagcctggccaacatggcaaaaccctgtctctactaaaaacacagaaattagccaggtatggtgggcacacctgtagtcccagctactcgggaggctgaggcaggagaatcgcttgaacctgggaggcggagattgcagtgagctgaggttgcgccgctgtactccagcctgggagacagagcgagactgtttcaggggaaaaaaagaaaaaagacaaaaaaacacatacccttggcagattcttcctgccccacccccaaaaggcccacttaaacaaaaaatggactgatgtactacatggaaaataattttgtcaggaaatcaaaatactgttggaagatgtatagaaaacattgctgaatatgtgaacaaacaatattagaacaaattttgcagtgtgggaagtttggtatacggttataaaagtacagaagcttctagcatgtctcagtatcgctagatactcttttttttcttttctttctttctttctttttttttttttgagacagttttgttctgtcacccaggctggagtgcagtggcaccatcatggttcactgcagcattgacctcccagtctcaagtgatcatcctacctcagcctctcaagtagccaggaccacaggcatgcaccaccatacctattttttttattttttatttttaggagagatgaggtctcactatgtttcccaggctggccttgaactcctggctcaagcaatccacctgccaaaagaccttccaaagtgctgggattacaggcatgagccaccgtgccaactgtgccaggcctagattaccttttaatagttacatccaagaataaggaccacttcttttgtgagctactggaagaaagttgtactggagaagacatatttttaatagtaaatgattgccttcataagaacattactatatggaataatagactgaatgtaaattaatggaacagctgctttgactgaacaaaagaatgaaattcattcattacttctctatgggcaggctgttgagtccacttatttgttaattatcttgtggtagagttgttgatgagttttgcatttttcttttttaaaaaaatgccaactttttgttatggtaagtggctacagtttgagtaatcctaatatgaaatccaaaaggcttccaaatccaacactttttttttttttttttttttttgagacaggttctcactctgtatgtagcccaggctggagcgcagtggcatgatcatggctcattgcagccttgacctcctgggctcgggtgatcctcccacctcagcctcctgagtagctgggactacaggcatgcaccaccatgcccagctaattttgcaaccagtaggaataatgcaaatagtacaaaatctgaaaaatacctaaatctgaaacacttctggtcccaagcatttcagataaggaatactcaacctgaacctagcaaatatcatttgaaaaaataatatcttaatctgtctcttcaagtaaaagtattatttaaatagtgagtgaaaaaggaactacttcttttcttagaaagaaatgtgcaggccgggcgcggtggctcacgcctgtaatcccagcactttgggaggccgaggcgggcggatcacgaggtcaggagatcgagaccatcctggctaacacggtgaaaccccgtctccactaaaaatacaaaaaattagccgggcgtggtggcgggcgcctgtagtcccagctactcgggaggctgaggcaggagaatggcgtgaacccgggaggcggagcttgcagtgagccgagatcgcgccactgcactccagcctgggcgacagagcgagactccgtctcaaaaaaaaaaaaaaaaaaaaaaaaaaagaaagaaatgtgcaatggtagagcgttttcctcgttggaattttttttacatgtaatcattataagctataacttacatattataaaattctcctttttaaaatgtacagttctgtggttttttgtatatgcatagagttgtgcagcttttgccactgtctagtttaagaacatttcatcaccccaaaagagaccctgcacccattagcctcacttcccattctctcctccctccagtccctggcaactactaatcttcctgtttctttggatttgcctattctggacatttcatataaatgaaatcatacaatatgtgaccttttgtagctggcttcttttacttagcataatgtttctggggttcattcatgttgtatcatgtatcagtacttcattccttcttatggctgaataataatccattatattgatatacgacatttggctaactggttcatcaattgatgaacatttatttgtttctactttttggctttatgaataatgctgctgtgaacattcatgtataaatttttgtgtagtcataggttttaatttctcttgggtatatatatacctaggagtaggattgctgggttaaacggtgactaactttgaggggctgtcaaactgttttgtaaagtgactacccattcccagtagcaactcacaaaggttccagcagcaatacaataggggtccagtttctcccagcaatgcttaggggtcccaatgtctcccatctttgccaacatttgttactctctttttgattatagccatcttagtgggtgtgaagttgtatctcattgtggtttttatttgcatttccatgatgatttatgatgtgcatcttttcatgtgctgttggccgtttatgtatgttctttggggaaatgtctgttcagatacttggctcattttaaaatttagttattgctctttttattattaagttacttatatatttttagatataagtcccatatcagatatacgatctgtaaatattttttcccatctgtgggttgtgtgttcagctgtttgcgtggacatatccttttgggtagatctaggagtggaactgctgagtcaaatggtaactctctggttttttttgttttttttgtttttttttttttttgagacggagtctcgctctgtcgcccaggctggagtgcagtgacacgattttggctcactgcaagctctgcctcccaggttcatgccattctcctgcctcagcctcccgagtagctgggactacaggcgccccccaccacatccagctaattttttgtatttttagtagagatgggatttcacagtgttagccaggatggtctcgacctcgtgatccgcccgcctcggcctcccaaagtgctgggattacaggcacaagccactgcgcccggtttgaggaaccactgactttgttgaggaacagaaagaacgcctgcacctttttacaatcccagcagcagtgtatgagtgtatcagtttctccatatccttgtcaacacttgttgttttttttaactgtagccatcctagtaggtgtaaagtggtattgcattatgttttaatttgcatttccttaatgactcatgatctgactgtgattttgttgcatctataaaattctcataatttgacacatgaaaaccttagaaacaattttgtaacctaataaaaatctccaaatgtgtttctaaaaacatttccagatgatctaatgaagtaaagaatctaggcattggtcaccagtggctgttaaaaccattagggaactttataataaagggatcagtgtgacaatcttctgatcaatcataacatctctaaaattgggacaaccaaatcttatattctttctatgtgatactaggaagaacatatcattcatgaaatagtcttgcttgccccaacaaacagagtcaaaccttcctctgattagtgtagatctgattactggtttataggatataattggcaaatttagaatgtgaaaaatattataggacaaatgaacccatttacttcaaatgaatggcaagaaaaaaaaagtacacgaactgctacagattaaaaaagacttgaggctgggcgtggtggcccacgcctgtaatcccagcactttgggaggccaaggtgggtggatcatgaggtcaggagttcgagaacagcctgaccaacatggtgaaaccccgtctctactaaaaatacaaaaattagctgggcgtggtggcacgcacctataatcccagctactcgggaggctgaggcaggagaattgcttgaacccaggaggcggaggttgcagtgagatcatgccaccacactccagtgtgggcgacagagcaagactctgtcttggaaaaaataaaaaagacttgaatgaaacatattaattgaacataagtatagatcttgtttagatcctgtttcatgcaaaccaactgtaaaaagttatttatgagcccattgggagtaatttaaatttgaaaaccacttgtatattagatgatttttaaacaattttaattttttaaaggttattatagtagtatggttacattaaaaagaaagactcctttctcttacagataggtactgaagtattttggatgaaatgatgttgatatctggaatttgctttaaaataattcagcatgtttggaggattacagacgagacaagaattgccatacgttgataattattgaagctggataataggtatataagggtttattatagtattttctctactgttgtatatgtttgagaattcccatagtaaaaaattaaaagagaaaccactgtaagggaagagttttagtggatttcatgtccatttgttagaaatagaaaaatgtggccaggcacggtgactcacacctgtaatcccagcactttgggaggccgaggcgggcggatcacctgaggttgggagttcgagaccagcctgaccaacatggagaaacccccgtctctactaaaaaaaaaaaaaaaatacaaaattagcctggcatggtggtgcatacctgtaatcccagctactcgggaggctgaggcaggagacttgctttaacctgggaggtggaggttgccctgagccgagatcgcaccattgtactccagcctgggcaacaagagtgaaactctgtctcaaaaaaaaaaaaggaaaagaaaaaaaagaaaaagaaataaaaaaatgtagtatctttgattaattttcaaaagtatatcacagaagatagatatttgctagccatatttaaaaggaaatatttgtataatgggggtgaaaaaatgattatcacagtttagtaaacacagccatagtgcttcttcctttggattcatgtttctttttggttatgatagcattaaaacttggaatcaggcttttaaattgctctataatatattaaaatgagatttttcaaacataatgagaaatatttaatcatatggattgcactaaaatatttttaagatgggttttacattactattttaattgatggaagtaccattattgtgatcattatgtatttcatttgaaatgttttgtagtatttataggtattagtacctgtgttctgtttataaatgaacatgtgttggggatgtatactcttatttattggtggatgtgcagtaaaaggtttgtttgtggagaacggactgggcagggtatagagacttatttgatgtttattagagcaaatgtggccagtgatgatggtgttctggattggcttagggtgggaggagtggtgatagggatggagatacatggacaagtatgatttaagcagtagaggcattagggttctagatttctggctttttggaagagatgattgctagttaatgaactgagcttttgtgtgtgggaagaagttgaaacctggcccctgtgaattgtgcaagtagttcttaaatattgattgacaaatagcttaacgagcaactaattttcaaatattggttgacaagtggcttattacaatattgtaaatgcattgatactaccattagtaaagagaatgtcttcctttgataatgttagcagcactgttaccagagcagtgtgggatagttccaggactttcactgtctaaaaggaactggaggcccaagcttttacggggatacttctgctctcctggttcccatgtccccagtgatgtgaatgtccctgactcagtgcctctgctcacgctgtctgtgagatcactgccttccagtgcctcttacctcttgggcctgcccactttgttaacagggacagatttcacagtgatttccagccagtatttctctctccccagtttggggtgttagctagaatggtccctcaaagccctcaaacacggatgagaaatagaagaagctcagggagactatacctgggctaggttcttgctaccagctggtggaagacaaagaaaaccccttttcttcctgtatttcatgcccagtgagcagtagtgccatcagcagcagttgtgaacccctaaatcagtgattctcaatatgactgacatggtggggaagacgtaagtttgaaaatgcattttcaggctaggtgtggtggctcacacctgtaatcctagcactttcggaggccaacatgggaggatcacttgagcccaggagttcgagaccagcctgggcaacatagtgagaccctgcttctacagaaaaataaaagctagccaggtgtaatggcatgcacccatagtcctagctacttgggaggctgaggtgggaggattgcttaagcccaggagatcaaggctgcagtgaacataccacagcactccagcctgggcagcagagtgagacccctgtctcaaaaagaaaaagcatttaaaaaaaaaaaaggtttgttagtgtttgtctcaaaattttgcttaatttaaaattatgtatatatttgaataatatgtgtccatgttaatagttctaaaagtatatatagtatatatagtaaaaggtagttttctctccccctgcctttcagctttccctttccataggcatccacaagtactatgagcaatacttgtgaaaccatgctgaaatactacatgctcataaaatgtaagttacttaagtttggtatttcaagtaacaataagggaagataggagagttttatgtttatcaaaaggggtgaatgttatagcagattgagatgagatgttcttacctttgggtgggatcttaagtggagctcaattcggtttccccaatgttagtgggagagattacttaaaccatccatacttatccagttgtacttggtaagttttcaaaggttctactttgaagagggcttttgttgagcaagtagtggttaatagagcagctcagttacatgtgtaagttttttgatgtgggaaaagggcttttgtatacagaaggactattttaaaattatttgggctttaaattaacatgtattaaagtggtaaatttaaaacccagttttcttttagtcttgttattgtacttgtaagcataggcattttgtatagaaataagaatagtaattttcacctgcttgtcaattaagttaatataaatttaacagatttaattgctccaggccccttacttagtgaattaaatttccttagatgtttaaaatacatttacacagtcagtctgtcaggcacagtcagtccttgacaggtcagagttaccaccttaaacagaaacttcttaagctcttgggcaatctgtgatactaagaaattaaatttgtaaatgtagtaaaacaggttttggttaagacttccagtgcttttcattagctgaatctgaattaccaacatttaaaaaacacataccctaaacttaacgcaaaagtactactagtaccatgagtttgatataccatacctcattttattgctcatgtcttttctttctgggattgtgatgccacttacccaattaaggaggacagttttatcatctcagaaagccatggttatcagattaaaaatacagaatcatgatacagttattattggtcagagatttgagactgggaaagggaactaaggggtctgtgtttccaggataattctactcaagagatgctgtgcctttccttatgttaagagtcctgaatgtggcatcaaagggggaatccatgttcagagtttgttttgcaaccccccatacctttttttgagacaggatcttggtaggttgcccatgctggtgtgcagtggtgcaatcatggctcactgcagccttgacctcctgggctcaagtgatcctcccgcctcagcctcctgagtaagtagctgggaccacagatgtacgtcatcatgcccagctaattttttgattttttttttttttttgtagagatgaggcctcactatgagcctaggatgatctcaaattcctggcctcaaacagtcctcccgcctcagcctgcccaagtgctgggattacaggcataagccaccatgcctggccttttcttcaaaaataacccttcaatcaattttttttttcctggtcaaattggattttgtgtttcttttatatattccttgtcaggccctacagttattttaattttgggtgttggatagactagggttcatattccatgcctgccatgctttttgtgaacttgggcaaaatagttagctcttctgagactcacttttgtcacctagtaaatgggttcagctgtagtactctatgtatttgtttgttttaagcattagatagtgcgtggtaaatgcttagcacagttcttagcacatagtaaatctttaataaatgttagaaaatataatgatcttgattctctgtcttccctccctagtagttgatttggggcacagtgtagcattatttgaattatcacagaataactttttacctttctgattttaacaggggagagtgtgtaaaggatgggagagggaagagagaaaaaagctgagtaaatgtgatcaactttacagtctttattccctgaactatctttccctgagttatgtgacacattctccttgttttcctctttctatctttgtggccactcctcagttccctaggcccctcttctttgaccactccttgtttgagttaccaaagattccatctctggccttcttgtgttgattctacacgttcttcctggaagcacatgtccatggtttcagcttccttgctaattaggagaaactttgtcctcagaacccatctggattacagccaacagcctactggtctccattgggctatctcccaggtacctataacagtctcagaactgactcatcttccttttcagcgtgttatttttataatctctatcttgatgaatggcacaacacagtgacccaaactggaaacttgaatgttgttcatctggttggtgatctgttcctaactgttttacatctgtaacatttctcaaatttgcctattttccaccatttctcctatcccttaattcaggctgcttctcacctagatgactgctgcaggttcccttgttgtctactcattattagtttctcattccaagtcattgattagatggctgccaaaagtgatctctttaacttcccaactttagattctgtgaataaaatccaaactccttaacagagcaggccctcatgatccaactcctcttaacgttggtagccttatcttttctctgagcccactgccgcttgatccttggtggtgctgtgctctttcttgctctctgtctttggttggactgcccacctccctccttcttacttgacattataatttatcagatagagatcagctcctccagtcagcatttccttactgactactccaagtctgacccagtgtagattctgtgcttatatctgtcaagtcacttattgtatgataattcatacacttatatgataattcacacattggcatgtgtagattaaacatttatagtctcagaaggatcctgatagtccaaaaggtatagtaatgcagttgtctcttagtatcttcaggtgattgattccaggatcccccccatggagatcaaaatccagggatactcaggtgccttatataaaatggcatatttgcatgtaacctatgcacatcctcctgtgtactttataggccctaaataatctccagattacctatatggctaaaacaatgcaaatactatgtaaatagctgttatactgtatttttaagtttgtttcttattttatggttttatttgtttatttttttgatctgtggatgtgcaacccacagatagagagggtcaactgggccgggcgcggtggctcacacccgtaatcccagcactttgggaggctggggtgggaggattgcctgaggttaggagctcgagaccagcctggccaatatggtgaaaccgtgtctctactaaaaatacaaaaattagccaggcatggtggcaggtgcctgtaatcctagctactctggaggctgaggcaggacaattgcttgaacctgggagttgaaggttgcagtgagccaagatcctgccatagcactccagcctgggcaacagaatgagactctgtctcaaaaaaaaaaaaaaaaaaaaagaagagagggccaactgtatgtaatttactgaagcatggattcacattatagatggtccctgatttatgatggttcaacttatgatttttatactatgatggtgggaaagctggtgtgatatacgtattcagtagaaattgtacttccaattttgaaatttgatcttttcccaggctagtgatatgcagtgtgacaatttctcatggtgctgggcagaagcattgacccacacctcccagtcagccatgtgatcaggagggtaaatgagtatactccatggtgtactgtgttgccaggtgattctgctcaactgtatgctaatgtgagtgttctgaacacatttaaggtaggctaggctaactatggcattcggtaggtaaagtgtgttaaatgcatttcctacttaaacgatattttcagtttatggtgggtatattggaatatagccccattgtagggcaaggagcatctttatttacccagttgagtttagtggcagcagaactaagttcggtttagctgttcagtgagccaagcctcacttagcatctaattctgtctttattttctgctttagataggccacagctctcctgaagggattaagactttctgtgtgaaaaatggtattcagaaggaagccagcattaattctgtttttatacatttatgaagatttgaaggaatttcactgtcaattctgtcttaattgtattctgtataataaatcataatggtatccaacggctcttgaaaggtttggtttttgtgaacatttctttgaatgtcaaagttgtattagtttgtttctcaattaaactgggtgctctttgagggcagggatttatgggacttgtttgttttgcagttttatatctccagctgctaatgcagtgcctggtttgtagtaggaatgagagatttactccaatagaaccatactaaagatcttacacttatggattacagttgatagctttgtagagtgaactggtattccctttaaatgagacgacatgacctgagtataaagtataatcaactacatgactccagcaagaataccatgtgtccctcagatagcatagctggcagatggagttatgcacatcaactggacatttaagacagctggagatttcttacatttagatgacagtttagattagaaatatttaatcttagctgtacttaatatattatgtagctatatgatacatcatgtatatatggtatatcatatatatcatatatttaatcacatttaatccttagctatattttcatccccaaaatggtatatggatctgtttttattgtcagctggttatttattgttgcttatccatggctcatgaaaatcttcatgttacttgggaaatctttcactctgccttttgaaggacagcccagaaccatttccttcttggcacatgaccttctaacccagtgaccaaagagtatgtaaaagcatggtacacactgcttttgaagattacgtgtgtctattctagatgtgtcttatttcttgcagatatattgcctacaaagattttgatatatatatatacagtagactatactatataattaatatttataccagatattaaatatataagcattctactagaactaaagttaagaatttgaaatagtctcatgtgagtaattaaaataacaatagcatctttttcaagaaagttttttttaatatggtggagataatgacatggaaaaaagtagttaattatttttggtattcccgtatttcatcagtaggttgccatagaacataatagttatataatcaaacagcagaataattttatatgaggtttattgatacagaaatgtttggttcagtgtttgtcttccagttttgcagattttcttttcgattttaaaactggagaatacattaaaaccagaaactttcagcctctataatgccctcaaaactcagcaggttttgaaaatgcctcttccttctcttctcctccccataatcctgcttatttttggcattaagtgagtcaggggttccaaacccaaatacgtttttcaaggctatgtagtcagtgtgaatgagagaagtaaatctgttgggtcctgtgccacactggagtttccaaggctggtctaaatgagttcaacttcagtttttttgtgtttttttagagatggagtcttgctgtgttgcttgagctggtcttgaactcccgggctcaagtgatcttccagccttggcctcccaaggtgctagaattataggcatgagccactgtgctggccaatttttttttttttagcccactgtgctaccagtttgtgatcttcactttaactgtgaaaggactgtcaaagattgtacgtataagatttagtttgagagccaggcctggtggctcatgcctgtaatcccagcactttgggaggctgaggcgggtggatcacgaggtcaggagatcaagaccatcttggctaacacggtgaaaccccgtctctactaaaaatacaaataaattggccaggcgtggtgacgggcgcctgtagtcccagctactcgggaggctgagacaggagaatggggtgaacccgggaggcggagcttgcagtgagcagagatcacgtcactgcactccagcctgggcgacagagcgagactccttcacccaaaaaaaaaaaaaaaaagtagtttgtctttctctttgaaactgaattcattaaacaaaagcctaaataactatactattacttgttatttatttatttatttattttagacagagtcttgatctgtcagcaggctggagtgcagtggtataatcttggctcactgcaacctctgcctcccaggttcaagtgattctcgtgcctcagcctcctgagtagttgggactacaggcatgcgtcaccacacccagctaatttttgtatttttggtagagatggggcttcaccatattggccaggctggtctagaactcctgacctcaagtgatccacccacctcagcctcccaaagtgcataagtgctgggattacaggtgtgagccaccacacccagcctactacatattcttttagacccagctgaaatatcacgtaattgctgaaggctcctgaactcttccagatcagggattgattttcctcattttaagattgtcatgacaactgtagtattgataactgtattttattttattttattttttttgagacagagtgttgctctgtcacccaggctggagtgcaatggcacgatcctggctcactgcaaacttagcctcctgcgttcaagcaattctcgtgcctcagcctcccaagtagctgggattacagatgtgcaccaccaaacacctggaattagtctggctaatttttgaagttttagtggagatggggtttccccatcttggccaggctgttctcgaactcctgcctcaagtgatccacctgccttggccttccaaagtgctgggattacaggtgtgagctaccgcacccggcttattaaccaatttttaatgttcagcacaacttgatcatgatgtacaatgtcttttttatgttatgtgttgatggagtcaaattaccgatattttggttcagttttttcaataagagatcaggctattttctgattttcattctgtttttttctttgatctgtatgtatttataagtgtctcttattttcaaataggttttttctagttatctttttgtaacggatttatagattatacattgtggttaaagaatatggtctataggctgggcacggtggctcacacctgtaatcccagcactttgggaggctgaggcagggggatcacttgaggtcatgagttcaagaccagcctggccaacatggtgaaaccctgtctctactaaaaatacaaaaaaaatttagccgggcatggtggtgggtgcctgtaatcccagctactagggaggctgaggcaggagaatcgcttgaacccgggaggtggaggttgcagtgagccgagatagtgccactgcaatccagcctgtgcaacagagggagactccgtctcaaaaacaaaaacaaaaaacaaacgaaaacacacacacgcaaagaatacggcctacatgcactttcagtcctttggaaattgttggtatttatttgccatttggcctagtttacccagattccacaggttgttaatgttgtacaattgcgtcttctctttctcacttcacccatctatgtaatttttctgaatcatttgagaaataagttgcaaacataatgctgtattacccataaatcagggtgtgtttcctgaaaacaaggatactctcctataaaatcaggaaataaatattgatataatactgccatctgattcacagaccctactcaaatttcactgatcttccaattatgtcttttatagcaaaaacaaaacaacagaaaccaacaaaattccctcaagaaaacaaaagcagaaaaacttccctttccccttcacttatttctgattcagggaccattcaggattatgccttgcgtttagttgtcatgtctgttcagtctcttttaatctagaatagttctcagtctttccttattttcagtgatcctaatatttttgaagagtagagaattattttgtagcaagtcccacaatttgggttagtctgatgtttccttttgaatagatttaggttatgcatttgtggcaggaataccaaagacacgatattatgttcttctcactgcatcgtatcaagaggttcatgtcaatttgtccaattactggttatgtttaattttaccacttggttaagatgttggctggcaagtttttgtaaaattagtttagaggtatttcatacttactggttagtaagtaataatgcattttgtggggtgatgctttgagactatataaatagcttatttctcatcaaatttttgcttgctagttttaccatccattggtgatttgtgcctgaatcagttattatagtggttgctagatggtaaatttaaaaaatttcattatttcttctgaattcatcacttggcatttctttttttttttttttttttttgagacggagtctcgctttgtcacccaggctggagtgcaatggcgtgatctcgtctcactgcaacctctgcctcccaggttcacgtgattctgccacctcaccctcccaagtagctggggttacaggcacccgccatcatgccctactaatttttgtatttttagttgagatggggtttcaccatgttggctaggctggtcttgaactcttgacctcagatgatctgcccaccttggcctcccaaagtgctgggatcacaggcttgagccaccgtgcccagccaatcacttgctatttcactctaaggaaaagctttctctctctggtttttgtctttgtttttgtttgtttaaaaatcttttaaacatatgagcacagcctcattgattcttattttgttcctttttcatgtattttttgatattcaaattgtcccaaatttggccagtgggaaccctttcaggctggctcctgtgtcctttttccatgtcctcatcattcttttttttttttttttttttttgagacagagttttgctcttgttgcccaggctggggtgcaatggcgtgctctttgttcactgcaacctccacctcccaggttcaagcgatcctcctgcctcagccacccaagtagctgggattgtaggcacctgccaccacacctggctaatttttctatttttgtttttattttttttattttttgagacggagtcttgctccgtcgcccaggctggagtgcagtggcgcgatctcggctcactgcaagctccgcctctcgggttcacgccattctcctgtctcagcctccaggcatgcgccaccatgcccggctaatttttttgtatttttagtagagacggggtttcactgtgttagccaggatggtctcgatctcctgaccttgtgatccgcccacctcggcctcccaaagtgctgggattacaggcgtgagccaccgcgcctggcaatttttctatttttagtggagacaggatttcaccatgttggtcaggctggtctcgaactcctgacctcaggtgatccgcccgccttggcttcccaaagtgctgagattataggcatgagccaccacgcctggtcatgtccccatcattctttgatcactttttttcttactttttggaataataagattttctgtgggctgggcgaggtggctcacgcctataatcctagcactctgggaggccgaggctggtgggtcacctgaggtctggagttcgagaccagcctggccaacatagtgaaaccttgtctctactaaaaatataaaaattagccgggcatagtggcacacacctgtagtcccagctgctagggaggctgaggcaggagaattgcttgaacccgggaggcggaggttgcagtgagctgagattgcgccactgcactccagcctggatgacagggcgagactccgtctcaaaaaaaaaaaatttctgggctcatctttacttttgttatctcagtcgtggaatcaataattttatcagggaaccctggttccttttattagtgaatgtacttagaaaataaaatatgtgcactactagatatgttctttctattggggtgttcttccttttaggctctatgtgaggagagaactagaatattgttttaaaatgtaccaggtaatcccagcactttggtaggctgaggcaggcaaggctggcagatcacttgagatcaggagttcgagaccagcttggccaacatgatgaaaccccatctctaccaaaaaacacaaaaagtagccaggcgtggtgacacgcacctatagtcctagctagagtgagatagagtgagaccctgacttaaaaaaataaacaaataaataaaatatactggaatttaatttataggtatgaatgacacagagaggccaatattattgaaaatgtgttactcacagttcttctgaaacagcaggcgcaccatactatgcaggaccacatggggaagcaccagggtgggtcaggaggcagaaggaaccagaggaaaggatgggtgagttttttttttgttaaagtgctagaaagttgttaggtgggacatcccctattgagcagaaagagaaacacaaatgttgagatttgtggttggacggtttgtaatatgatttttgtgtagcctcaaaaacacagagatggtatgaatgtaaacaactttggtcgttaatttggcccatcctttcaagatgccaaatcatcaattacagaatatcaagaatgattatataggtatgtatgcatgtctatacatacatatatacatctgtatcttcctgtaaataatgaaagccatggtttcattccaatactcttaattctagtccaacacaatagggtttcttctggtgtttcccttttctgacattgaaaaatctgaggccaggcacagtggctcttgcctgtaatcccagcactttgggaggccaaggcaggtagatcacttaaggtcagttgctcgagaccagcctggccaacatgatgaaaccccatctctactaaaagtacaaaagttagccaggtgttgtagtagtggtcgcctgtaatctcagctactcgggaggctgaggcaggagaatcgtttgaacccaggaggtgggggctgcagtgagctgagatagcgccactgcactctagcctgggcgacagagtgagactccatctcaaaaacaaaacaaaacaaaacgaaaaatctgcctctcctttttttttttcattcattcattaattctttagatggggtcttgccctgtcacccaggcggtagcgcagtgacacgattatagctcactgttgcctcaagccatcctctcgcctcagactcctgagtatctgggaccatacaggcacgtgccactgtgcttggctctcacattgtcctttttactcaccttcctgttggtgacaatctcctgactatgtaggccattttcttgcccccagccccactgaatgagctggctgatcactccttcaagttccatgagccattgttacatacaggtagtactcagtttgcttggttttgatattcataaatttccattgctgtggtttaattaaataatgccagtcctcaaatagcagttaatgaaatacaaaatataacctgtgatcaagaaaagcttctcaggtgggcgtggtggctcatgcctgtaatcccagcactttgggaggccggggcgggtggatcacctgaggtcaggagttcgagaccagcctgaccaacatggtgaaaccccatctctactaaaaatacaaaaaattagctgggcgtggtggcaggtgcctgtaatcccagctactttggaggctgaggcaggagaattgcttgaactcaggaggcataggttgcagtgacccaagatcaagccattgcactccagcctgagcaacaagagcgaaactccatctcaaaaaaaaaaaaaaatagcttctccaaaattttaaaaatttaccctgaccctgaaatagttgattgttccctccctagacatcattcagttggagctagcctaattttgttttttttgttttgttttgttttgagatggagtcttgctctgttgcccaggctagagtgcagtggcgcgatctcggctcactgtgacctctgcctcctggttcaagtgattctcctgcctcagcctccagagtagctgggattacaggcgcgcgacaccacacctcgctaatttttgtatttttggtagagacagggtttcaccatcttggccagactggcctcgaactcctgaccttgtgatccacctgcttcggcctcccaaattgctgggattacaggcatgagccaccgcacccagcctttttttttcccttgaggagaattacagtctgcactgctctcagctgaactttacacagcttttacatttccctctgtcagttcctcttgtaatggtgggtgggtagctgaagggaggatatgtacaataatgtatttttagttcctttgaacagagaggttgcttcagccattgctattgatggcaggaagtatatttatagctccagggaaggaggggtagtacgactgctggtttaagaaaacctgggagattgtatttaatatatgttgttaaaactcatttgtactttattgtaagttcttgccttagaaatgcagctgagatgaatgaacctgttacttatgttatattgttacttatgttatatatgttatatgtattattgtaagtatattgactctgctccctaatttggaaaaatcttccgttttgaaattttacaatatacaatacctaaaacaaagagtacttctagagcatacaggatgtatgtggagaattcaggtgttagcatgcaattgaacagtaaagatactgactagcagtataaatatcgtccccatttagatattttattcataaagttcttgttggtgtagcttttattgtgattttttcttttttttttttggatacagagtctcgctctgtcacccaggctagagtgcagtggcgcagtcttagctcactgcaacctctgcctcccaggttcaagtgattctcctgcctcagcctcccgagaacctgggactacaggtgagcattaccacactggctaatttttatatttttagtagagatggggtttcaccatgttggtcaggctggtctcgagctcctgacctcaggtgatgcacttccctcggcctcccaaagtgcagggattacaggtgtgagccactgcgcctggccaattgtgatttttttaaagattgaaaccaaaatattttatacagatcataagatattcttggtaaacactaagcacctcataactttaccacaattttgattgcacaactttcacctgtggttatcatgtgcaatgggcacattcaacacaaatcaaattattctgaagcttgctttctttcttttttccctactccctttcttaattgaggggagcaaaaagttggtttccagggatatgtcttctctcttatgctggtcccagattgatgcagtcatggaaactaggcagtaaactcattcttggcagctgccggcactggtctgattctttcttttaaaagcatgagattctttaataacacatattggaaagattgatgccaagtgattccaggtcatcctagaggaggcttgggaacattgttgaatagatttaaatgattcagttaagtgagtgatttaacccaaggtttgtgtctaatttaaacaggacctataaaatatagaacaattggtttgtttcttttttagaatattgaagattagattttaatttgagaattttactaatttgagggttttattttttgtttttaagcgttcaaaatgttgaattgtagatatgctgagttttataatgagcacaatgaaggtttttcaactggcccgttaaagccaacccactaatgaaatgaaaatatgaaatattatgactccataatatttcatggattttgaagctgggctgcctgggttcaaatcccatctctgctactttttgggtacgtaaccttgtgccagttacttaacctctctgtgcctcagtttcttcatctgcaaaatgggagatagtgcagtttgagtgttcctaatctgaaatctgaaatgctccaaaatctgaaactttttgaatgcctacatgactgctcaaaggaaatgcttattccatggagcatttggatttcggatttttgggttaagaatgctcaattggtaagtaagtgtaatgcaaatattccaacatctttaaaaacctgaaatccaaaccacgtctggttccaagcattttggataagggatactcaacctgtaaataatgtctgtttcatggggttgtgatgtggagtaagtgagcaaagttgtgtaatgtgcctagcttatagggaacacttagcaaatgttggctattccatttatatataagaaatagaattattggctgggtgtagtggctgatgcctgtaatcatagtgctttgggaggctaaggtgggggattgcttaaggctaggagttcaagaccagcctgggcaacatagcaagactctgactctgcaaaaaaattcacaaattagttgggcgcggtggttatatgcctgtagcccttgctactcaggaggctgaagcaggaggatcgcttgagcccaggaatttgaggctgtggtgagccatgataatgccactacactccagcttgggcaatagagtgagaccccaacttaaaaaaaagaaagaattattgatgggattgtaaaggctgaatattaaataaattcagaggaggtttttacggaacttatttgtgaaatatttttaaaggaaggaaggcatgtttgttttaggtttataagagatggcagatttaggaagctcctccctactccagatgaataagccatctgtttttctatcccttttaaggatttgcttggtgggtttccataacttttttttttttgagactggatcttttacccacccaggctggcgggcagtggcgcaatcatggctcactgcaacttcaatctcctgggctccagcagtcctcccgcctcagtctctcttgagtagctaggaccacagacgcgtgccaccatgcccagccaatttttatttatttttttgtgtgtgtggagatagggtctttctatgatgccccggctggtcttgaactcctgggctcaagtgatcttgctttggccttataaagtgctgggattacagttatgagccatggcgcccagtctatgtattcttacaaaattaaattcatgttaagtgctacactagcagaatttttaaaatttttaaatgatgcacaaatagagaagagagagtgcaaattaacgagaaataggcaagactaatttgaagaaaactatgaagctttactgaaggatttttttaaagatataaaatgctggccaggcgcggtggctcatgcctataatcccagcactttgggaggccgaggtgggcggatcgtgaggtcaggagatcgagaccatcctggccaacatggtgaaactccgtctctactaaaatacaaaaaattagccgggcatggtagcggatgcctgcggtcccagctactcgggaggctgagctggaagaatcacttgaacccaggaggcagagttgcagtgagccgagatcacaccactgcattctagcctggctagagagcaagactccgtctcaaaaaaaaaaaaaaaaaaagaataggcaaataactagagaaaaatagtccagaaacagacctgaatatatataggaatttagaatatgaaagtgtcagtgtgtaggaaggagtgaaatgaaaaaagaaagaaaaaaggaatatgttgaaagtggcattcagaaatcagggagaaaatgatcgattactaagaatgatcctgtaacagtgggctgtttggggaaaaatacgtaaagatttctaatttagactatattcaaataatcaccaaattatatagagcagggatacccaacctccaggccacagaccatcctgttaggaactgggccacacagcaggatatgaactttaggccagggaacattacacctgagctctgcctcctgtcagatcagcagcagcattagattttcataggagcacaaaccctactgcgaactgtacactccagggatctaggttgtgtgctccttatgagaatctaatgcctgatgatctgaggtgttgcagcttcatcccaaaatctgaaaccatatcctccacccctccatttcatagaaaaattgtcttccacaaaactggtccctgggtgccaaaaagattggagaccgctgataatagagtatatataatcaaattacagaaataaccacactctattcttcctctagaatatactgaatgtttcctaagaaaagttgaacactcatggctggttggctgctctctagcacatcttgccttcgtctctcactagttgaattttacacttccaggggtcagtatgtttgttccaaatctgcttatgccagttacatttagtactgtaattttataatttaattaaacattaactaatgaaatatgactgcaaaaagtagttgtttttaggaaaattaagttgtagatcttgaacaaattggataaatacaaatccccttttccccttttcaccaaattactgtcttactaattgtgggcgtgaatattttgaaagattgggggtggaaatcataaaattctttttttttttttttttttttttgctcttgtttcccaggctagagtgcaatggtgtggtctcagctcaccacaacctctgcctcctgggttcaaatgattctcctgtctcagcctgccgaatagctgggattacaggcatgcgccaccacacctggctacttttttgtatttttagtagagacatagtttctccatgttggtcaggctggtctcgaactcctgacctcaggtgatccacccgcctcggcctcccaaagtgctggtattacaggtgtgagccaccacacctgacctcgtaaaattcttaaacgatctatactcagttgtcttacagttgcctagattcttgttccatttaaagaaactgaaatttgaaatcacaaatgtggattatggatatgatgggttatggatatgatatatttgtaatgaatatgcaagagagaacatttgaaacattaattagtagaaatgtacttaaagaagaggccttggttttttaccgtaatattggcaggtgacatgtatttgttttgagtaaaaatcaaatatttcagttacatttttaaaattacctgatatactgtactttttcatgtaaccagtcagccctgagtcctatttgtgttagataagtttttaccaatcccagaaggagatagaggacaagcttttatatgcttcggctgaagaaaacctttctccaaagaagtaattatctgatcctcctataaagggccagatagtaaatattttagattttgcaggctgaagtagaatcaagggtaatacgtacgttctgatataacaagagagaaaacaaattttgagaaatttcttaattgattaaattcaaaataataaacacaatttattgaaatacaggtatactaatgagaagaatggagttcttttcggagtgataacattttcttaattggagttcagagttagtgcttcctattcaataaataatcatcaaaattgattgcaagtatttatctattaatgcaggtctgtaatgaggttttatatatttcatctttgacatgtcttcacacatacatgtcaaataattgataccagcccataaacatatgattttaattgagcatattaataactcaggaagcatttatagaattaggtttttcttataacatttaccttttagtatattattcattgctgcttaattacttccaatggaaggttagacagaagctccacaattgcactgttaaatagatactgaaatatagatatttccttgtgcattaaggtcctaaaaattattctggaaatgtagtgtgagctaagaaactatatccactgcaaatttgtttgggaatggagatctcacttcttgttttaacttttgatagcatgtaaagtgtataaagcagctcaacgttgcttatgattcaaaagttagttgtctaaataacaacagtttaagtttcatatataagtgttgttctgtcctgtaattttaagttgaatttactattataaaattagcaaaagctaattctcaaagccatttattgtttgatcatagtgtctgaaagcagtcttattgttgtgaaaaatttcaatctcagttccaagctgaaaagaaaaaaaaaaaagcatgataaaactttagtacagctcagccgtcaaactgctgtgtgcctgggcaagtcaggttattcagcttctgtttctgacaatggttaagcccatggcagtgaatgaaattcaccattaacatggttggtttaataattcatgataaattcagatatttttcatagaatatctattgataaaaaacatgaataaccaccttacattttcacgttttataaatcacccaactaagcctttttctgcttcacacatatttttaccattatcaatgataacgtatctgagattccactttaggttatatggaattagtactttttcaccttcttgtttgtagttgttcaacacagactattcatagaagctaattcttcagttgttttaaacttggcactgactccttgaataaacatctgaacagtgttgtaacatctatcaaactcattcaaaagagatggaaatctacttaacctcaattgccttggttttttttttaaacagattattgatcttgctcctaatattttcgacttttagagcaaatgattttgttgaaaggctaatagtctttttttctttttaaattatcttatattaaatttaaaaaataatttttttgttacctgtctggagaaagcctagagaaaggctaattaatactcttaaacaagtttattttctctggatacatttcttcagcttcttcatgatttaattcacttatcactagaatattacttttcttgctttgctaacaaatgagctacttagaaacttccctcctttacaaactttctattccttaccttccctccttgctgtaatgaaatattccactttaaattttcaaatttttctgaccattgctttcctgtgaatcggaaatactgtgatcggtccttagtttggtaacattgatgtattttgaattcttttagcacagacagacagttgactccttgaacaacgcagtttcaaactgcacaggtccaattatatgagaattttttttcaataaatacaatcagcagtttatacatatacaaccaaacgtggatcaaaaatacgttatttgaggaaacccccagatacagaacagtgaaatttttgtatcctctgggccactgtgggacttgagtgtgcatagattttggtatccacggttgatccacagataccaagggatgaccgtagagtcattgcataataaacaaaatgcttccctatcttgtcttgataaaataatgcataccctccactgtgccttaaaagcatgacattcaggctgggtgtggtggctcacacttgtaatcccagcacttttggaggccagggtgggaggattgcttgagcccaggagttcaagaccagccttggcaacatagtgagagtccatctctagttttaaaaaaatacaaaattaaaaaaaatgaaaaacatgacattcaaagtgcatttgtttttgtttcgacatgatggttatgcactaataactaatgatagttatgtactaataaaatgtcaaaataataacgacttttagttactgataacagttatgcattaataaaaaataaaatgtcacagtatgacaatatgcatgtgtggcaccaaacatgctgttgagttataactttgtgactgtgatttgtgggatactgagcagcagtggaaagctatataagccactccactctgccagtcagtacagtggctgattaccaattatggataaccagaacacatcaaaaagcagttcaacaaggatcagaataataacatgtaagtaccatttattaagtagttatgtgtaaggcactgtgtcagactgtataatgtacattatttaaccttcaaaagattgagagggaagatcccttgagtctgggaggtcgaggttgcagttagctgtgattgcaccactgcactctagcctgagtgatggagcgaaatcctgtctcaaaaaacaaaacaaaacaaaacaggcctggtgcggtggctcatgcttgtaaatcccagcactttgggaggctgaggctgaggtcaggagtttgagaccagctgggccaacatggcgaaaccacgtctctactaaaaatacagaaattagttggtgtggtggctcacacctataatcccagctactcgggaggctgaggcaggagaattgcttcaacccaggaggcggaggttgcagtgagccaagatcatgccactgcactccagcctggatgagagtgagactccatctccaaaaaaaaccaaaacaaaacaaacgaaaactacaaaagattgtctgaagccagccacagacaatagtaaatgaatgagtgcagctacattctttcttatttatggatgcagaagtttgaatttcatataatttttccgtttcacttatatataaattatatattatatattacataatatataatatatattataagataatataatatatattagataatatatataatataagataatatatattagataatatatataatataagataatatatattatataatataattaaaatatattaattataatatataatatatgacatatatatgttatatattgttatatataatatgtgtaattatatattataatatatgatatatatataatctatcatatatcatatatataatctatcatatatcatatataatctatcatatatcatatcatatataatatatatcatatcatatataatatatatgatgtatagtatatatgatatataacatatatataatatatgatgtatagtatatatgatatataacatcatatatactatacgtcatatataatatgacgtatagtatatatgatatatgatatatatactatattgtatatgatatataatatgtattgtatattatatataatatatatataaggcacagtggagggtatgcattatatataatatgtattatatattttatatattataatatatattttatatataatatattttgtatattatatattttatatataatatattttgtatattatatattttatatataatatattttgtatattatataatatataaaatgtatattatatataagtaaagtatatattatatataatttttatatatactttttttttttttttttttttagactggatcttgctctgtcacccaggctggaatggagtggctgggactacaggtgtgtgctatcatgcccagctagttttttttttgttttttttttgttttttttaattttttttttttttttaagacggagtctcgctgtcacccaggctggagtgcagtgacatgatctcggctcactgcaagctccgcctcccgggttcacaccattctcctgcctcagcctcccaagtagctgggactacaggcacccaccacacgtccagctaattttttgtatttttagtagagacggggtttcactgtgttagccaggatggtctcgatctccggacctcatgatccacctgccttggcctcccaaagtgctgggatcacaggtgtgagccaccgcacccggcctactttttattttaacttttttttttttttttgtagagatgtggtctcactgtgttgcccaggctggtctcaatctcctggggtcaaacagtgctcctgcctcggcttcccaaaatgttggtattacaggtatgagccactttgcctggctatcttataaataattttgatgttaggaatttttagttgcttttatttttatttttgttgttttaaatatttattaatagaagcaaggggtggataaatcttctagatcaaactcttccttaaaatagttctgcttttggtaggattccagattttcctagttttgttaagtgtttctaatgatgtttggcataggtgttaacttcatgggcctgttgtatacaaaccaatttttttcttgctctgagtgaacagtaacagaacctggtaggtgagtcacactgatactgcattcactgaagttactaagctgaatgataagagatgagaatcctttgcatttgtattcaaatcaagagttgtagaatttgaaattcctgttttgatgaactatgtgaagcatgctgtcattcttctctgctagtctatgttgatgatgtcattaaactagtctttgacttttagttcttggcttaaaatattggaatgattatataataaataggtttatttcatgtggaaaaggaataatgtgtttgccctgaaatagtctgatctgatcaggaggatattatgctgagcatggctggaaataaatttgtagcaccaattaaatacactgtagcagctctgagagggaataaaagtaaaatataaatagtaaatatgagagaaagtgactatgggatctaactatgtaagagcagggtgggagtatgggtagatacgtacatgccccctagattttaggaaagcatatttcaagaagtagagaagacatggatatcaatcagtggaaatcgtatactaaaacggaagtcagtgaaaaaaaaagactgctctcaaactaaagatagatggttgcttctaataggtaggtattcagattcgattaagaaattagaaggccgggcatggggactcaggcctataatcccagtactttgggaggtcatggtgggcagatcacttgagcccaggagttcgagacaagcctgggcaacctggtgaaaccccatctccacaaaaaataccaaaattaattagcagggtgtagaggcacatgtctgtattcccagctactcaggaggctgaagtgagagaatcacttgagcctgggaggttgaggctacagtgagccgagatcacaccattgcactccagcctgggtgacagagtaagaccctatctcaaaaaacaaattttgaaaatatacagaagtatagaaaaactgaagtaatttaatttgtgttaaaatctgtttggtattaaaactaatgtttggccgggcatggtggctcacgcctattaattatcctagcactttgggaggccgaggcaagtggattgcttgagctcaggagttcaagaccagcctgggcaacgtggcgaaactccgtctctacaaaaaatacaaaaattagctgggcatggtggctcacgcccgtagtcccagctcctttgcaggctgaggcaggaggatcacttaagtccaggaggtggaggttgaagtgagctgagatcgcacctctgcactccagcctgggtgacagagtgagaccctgtctcaaaaacagacaacgacaaaaaaccctaatgttttatgaaaaagctctttaatttttcgtgaccaaactgctattctctagacctacactgtccaaaatgatagccattagccatgtgtgctactgtgttggacagcacgtatttagaacatttccaacatcacaaaagttctattgcagaatgctatgaaaatgagatacactttcattagaaaagctagtaaaaataagtaggggtaatggggtactttgactatccagaaattttactaaggaagaattagatttttataatactgggacattagtgtgcactttttttgtcgtaattgcattttgttttttattttgaaataaatacatgtacagaaaaattgcaagaatagttacagagtcttttcgctccctgaaccattagagagtgagccccatcagccccaaatactttaatgagcattaaatctggagtttggccgggcacggtggctcacgcctgtaatcccagcactttaggatgacgaggtgggcagatcatttgaggtcaggagtttgagaccagcttggccaacatgatgaaaacctgtctccactaaaaatacaaaaaaatgagccgagcttggtggtgcacacctgtaatcccagctactcaggaggctgaggcatgagaatcacttgaacctaggaggcggaggttgcagtgagctgagattgtgtcactgcattccagcctgggtgacagagtgagaccctgtctccaaaaataaaataaaataaatctggagtttaataccagtacagtactaccagcttatcttcaggccccattcgagttattctagttgtccccaaaaggtgaaggatccagtttaaaatcacacattgcatttagttgtcatgtctgtctttgacttgatcgccttgacacttttgaagattacaggctcattattttgaggaagtcattaacatggacctgatgtttcttcatctttagattcagattatgcattttatcagaattgccacataaattgtgctgtgttcttattttatccatccaggtactacataatttccatgtgtcccatttttcttgatgttaaccttggtcacttgattaagattgtgtctgccagttttctctaccatacatttaactattttttcctttataatcagtattttatgaggaggaggaggaggtactttgagacaatgtaagtatcccattcctcatcaaactttcaccttctagttttagcacccattgaaatttttttgctggattattggtatgatggctgccaaatgatgattttctaatttcatcatcccttctacatccattcattgacatttcattgaaaggaaaaactgttttcttcccatttatttaacttatatcaatatggacttacggattcatattttattcaataagttatctattagtgtactttggtactttgatgctgagtttgtcccagatttggtcagtggaaaccctgtcaagctggcttctgtatccttttgacattgtcctatcattctttgatcactttcctctttctgggaccagatatgatcaaagcccttcttatacttttcctgccctacctctggaatcatttcaccaaggtaccctggttccctttattgaagaatgtatttagaggttaggtctggacagtagatggcattgttccactgaggtgtcactgctcctagactttctcagcagacagagctagagcatatatgcatgtatatacatacacaaacatacatccacacacatagactcatttttttatttcttgctctgtgtgtgtgtgtgtgtgtgtgtgtgtgtgtgtgtactgtgagttcacactggtacctagtacctcaacacctcagagttcattttatttttcttcctttttgtatttgtaactcccttctctgacagagaaactgggccccagtttttcttaatatattactatttacttaattgatcaatccccttgaatgtgcccagtctttcctttccttatcagatcatgtgcatgctaaccttgctcagccccacctaatggtttttagactgaattatttggagacgaaaaaagtacggttgatgctcattagtcacagattttttttatttgcaaattcacctacttgctaaaatttatgtgtaaccccaaaatctgtactcgtagcacttttatggtcattcatgaacacgtacagaagggtaaaacatttgagtcgctattgggtaacgtgtattcctaggtgaggccaagcaaggcagtctactgccttcttctttgagtcctcatactataaatagttgtcccttttgcagtttacttagcgccacatattttgcattttgacttcttttacttagcatgtgttttcaagttccatccatgtttatagcatgtatcagtacttcattcttcttcttttttttttttaaagagttgggggtctcactgtgttgcaggctggaatacagtggctattcacataggccatcatagcatgctgtagcctcaaactttcactgggctcaagtaatcctcccacctcagcctcccaagtagctgagattagaggtgtgggccactgtaccaggttccttcctttctaaggctgaataatagttcattgtatgtataataccacattttgtttatctattcatccaataatgggcatttaggttatttccaccatttggctatcttttgaaaatcttttcatgtgcttgttggccattagtatatattctttggagaaatgtctcttaaattctttgcctattttttaaattggggggaagttgtctttttttgttactgaattgtaagagttctttattctgataactagacccttatcagatacatgatatctgattaacacatagtttcttgcatcccataggttgtctttcaaaattttgacgaattccaatttgtcagttttgttgcttatgatttttagtgtcatatctaagaatccattttcaaattcagtgtcatgaagatttacctatgttttcttctaagaattttatagttttagaccaagcgcggtggctcatgcctgtaatcctagcactttgagaggctgagacaggcggattgcctgagctcaggatttcaagatcagcctcagcaagatggtgcccatctctactcaaatacaaaaaattagcctatggcgtgtgcctgttcagctactcgggaagttgaggcaggaaaattacttgaaccatggaggcagaggttgcagtgagccgagattgcatcactgcactccagcctgggccacagagcgaaactatgtttccaaaaaaataataacaataattttatagttgtagctttttaagtttttaatccactttgatttttttgttttgttttgttttttgagacagggtcttgctctgtgctgcaggctggagtgcagtagagcagtcttggctcactgcagccttgacctcctgggctcaagctatcctcccacctcagcctcccaagtagttgggatcacaggcttgtgccaccatgcctggctaatttttgtattttttctagagatggggtttcactattattgcctaggctggtcttaaactcctgggctcaagtaatccatgcccaccttggcgtcccaaagtgctgggattacaggcgtgagccaccactttcagtcccaagttaatttttatatatggtatgaggtaaggattcattcttttgcatgtgaatatccagttgtcccagtgccatttgttgaagagcctgttctttccccattgaatgttgtcttagcactctttccaaaaattagttgaccatagggcatggtggctcatgcttataatccaagagctttggaaggcccagatgaaaagattacttaaggccagtatttcatcaccagccagccatggtggtgtgtgcttctgggagggtgaggcagaaagatggcttgagctcgggtgttgaaggctgcagtgagctctgattgtgccactgcactccagcctgggtgacagagtgagacactgtctctaaaaaatagaataataaaaatcagttgactatagatttgtggatttatttctgaactcatttaaaactattccattgatctatatatcactccttataccattaccacacagctttggttaccggtgctttgcaataagttttgaaatcaggaagtatgagttctccaactttgttcttccttttcaagattgttttggccattcggagtcccttgcaattccatataaattttaggatcagtttttttatttcttttttttttttttttgagacagagtctccctctattgcccaggctggagtgcagtggcgtggtcttggctcactgcaacctccatctcccaggttcaagcaattctcctgcctcagcctcccgagtagctgggattacaggcacacaccatccgcccaactaaattttgtatttttagtagagatggggtttcagcatgttggccaggctggtctcgaactcctgacccccaagtgatccgccggcctcggcctcccaaagtgctgggattacagacatgaaagcttttttatttttgaaaaaataaataaataaataaagacataagatgtctttccatttatttagggtctccttgttcttggaggtagattttctctgatctattttcattgagaccttgggccttaagagagccacaatttcatgagagattatttctctggagcccttcctacccttctcctatttcctgtctcctttcctcccttgttattcaaaagtcttaacaaatgctcctgggcccaatacagaggtcagctcacacttccagccttagctttggttcactttttgctttcttgccactggtagttttccctcctctcttaagaacttagctaagcttttcaaaggatgtttgcatttatccaacatttctagattttggtagctggagagttttaataattttctagattgctgttttactagattagaaaaagatagagctgggtgtagtggcacatgcctgtaatcccagctactccagaggctgaagtgggaggattgcttgagcctgggagttagaccaacctgggcaacatagtgagacctatctcaaaaaaaaaagtaagactttagggcgcagtgtaatcccagcacttttggagaccgaggcgggtggatctcgaggtcaggagttcaagacaagcctggccaagattgtgaaaccccgtttctactaaaaatacaaaacttagctgggcagagtggcaggcgcctgtaatcccagctactctggaggctgaagaagagaatcacttgaacccgggtggcagaggtttcagtgagccgagattgcaccactgcactccagcctgggcgatagagtgagactctgtctcaaaaaaaaaaaaaaaaaaaaagacagtgttttttaaagatggagtttagtatacagaaatattgggtgtcaggcaaagtattaattactttgtacgtattctcttttccttcttttttttaaaacgagacagggtgaccaggctaaactctgactgttgggctcaagtgatcctgccttagcctctggagtagctgggcattacaggcacatgccactgtgcccggctacatactcacttataaaactctatttttaaatgacagctcctctttacaaaatagatcaggagagcgattttcctgtctgcttcctgaggaagcaaaaaggcagaaacatggtgagcagcaagaccagtggttgccgtagtaagcatgggacttcctatgaatggctctgttaacagtaggggatggtaatgttctttgatttgtggactctgtttgatttgtggacaaggttttatttcctgtctttggggtaggagggtctgccatatccacaaattggctcttcccatttgttgtattcatttagttagaccatgattggaaagcctcactggctgtgcacattgcaccatacttaggaatatatgacggttatacatttcaaacagggctttaaaaccttccattcagctccttttggataaagctcttttcctcatgtggttgttgacatacatgaattataggctttgtttagctagtgggtaagagcagattttggagtcatgtacacctgggtttgagtttcagtcttgccatgtaccagttgtttgtggacaagttatttattaataactactctgtaccatagtttcttcattggtagtatcttcaaaatgaagtatctatttcctgtgctgttttgaaggtaaccttaaataatgtgcattgtacaatttgatacagtgtctgacacgtagtaaatactttaatatataatacctgtttttattctgatccttgttgagctgctgctttttgatgtgttgattatatataattggtaatcatccattttactgacatcttccaagatttgaccaagttgattgtctcaaatttccaagcagaaaaagtacccagaaaacagaaattaagcagttattaaagaatcgaatagcaatgatcattacgacttgtgcttaataagaaatgtgggccatgtctgcctgagcctttatttaatgcattttaaaatttgctgggttttttcctccctttaaaccttactatcaggttcagtaataagttaaactaaaaagaaacggatgccttagaataaagaaagattcaaattaataggatatataatggcctttcatggtggtggaatttctgtgtgttttgaactaagggaaagacttaaaggaagattgcctacagtgtactggacactttgctaggctctgtggatattatcaagacacagtccttaccctcaaggatctttttatttttcttttagagacgggatcttgccctgccacccaggctggagtgcagtagcaaaatcatagttcactgcaacctccactcactctcaaggatcttactctcagctgggggaggccataaacagttaaagtagcttactctcagctgggggaggccataaacagttaaagagttaatgattgactctagggctaagggaaagaaagtaattgggtcaactaggatttctagcttggcaagggggtagacctggattggcaaactacaacccaatgccagtttttgcatagcccacaaactacaaatgtttcttacatctttgagtggttggaaaaatatcaaaagaagaatactattttgtaacgtggaaattatataaaattaacatttacatgttcataaataaggttttattagaatatagctatgctgaaactacatatctatgactgcttttttgtcacaacagcagagatgagtaattgtgacaaaggctgtttggcctgcagagccaaacatttactgtgtggctctttacagaaaaagtttgctaactcaatgagtaggtggtaatttttatccattgaaacaagcaattaaggaagaacagatacaggagaagataacatttctgtgagtgttgattatttgaatcagaggtacttgtgaatatgcaggtctagaaggcaagggaatttataggtttggagtttggaaagagcttgaggctggaaatggatgtgggaggaaaggaggagatcaagaagactggatggaggagtgcaatttttagccctgtctgcacattggaatcacctgtagtgcttaaaaccaaacaaaaccagacagacatttccaggaacccaaccccaactccctctttcccaagattatgatgcacctgagctggacttgggcaccagaattttttgaaagctcccccagcaactctaatgtgcagccactggtacagagtgagaagattggaagatgggacaccaggaacaccaacatttaagggatagttctaggtgcttctgctgaggagaggaaattctgagggagtgatgatgggaattttagggtggtcagatcctgtaatttgagatcattgttgactgatgaatcaagagcagtttctgtagaggccaggtgagggtgtatgtcagaggcccctggtttgaggtgggagagtatgaactattgagaatattgaccgggaggaaaggggggaaagtgatggctgggatggggggcattgggaatgtagtttgttctagagaggtttttttaagatgttaaagccttgaggctatttatgtgctgagggagtgagtactcagaaagaaagcctggaatggcagtatcagatgccaccattcagttttcatgatggagtgaagggctagattttgaatagttcttggaataatcttaatattgtaacctttttggaactgtttgcttaatgtgctttcttcatttaggtgcattacattgtacctggaaagagaaatggacccaggcattgagaagcaaggccaacaactctgctttgcttgcccggttactgtcgttctgtctgggacattggtctcatctctgaaagcaggagggcaaactgaatgggctctgtagtctcttctaaaagtttttagtttaaactattaatagtacaactttgatttaacaaatgaggaagctgagcttacgagatgtctgtgaagcccattgtctgatcttttatttccttagtacctgggaatgcgcttttttttttttttttttttgaagaacaccaacagttgttcacccttccttgaatttgggtacactgtatatacagagtataccaatttagcctgccattagaacatgtcttcacgagcaaaatctagtataaagtcttactttaatattttctttattatgtataaataatagatggttgttatggaatactggatagtacaaaagtttagaatttttaacattttggtttatttattgggactcttttttccccccagtgattcttgtttctccaacaatgtgaatgcgcactccattcagtgtgaacgtgaatgttaatttatgtgccagctggattctacaggaagcagacacagatggggttggaggggcaaagggcttattagaggagtaatgcctgtgaagaaaaggggaacggaacatgtttgggtatagggagccatcagactgcagtgcacacctgacgaagtctctgcccacccagattgcctgatagaggaataccacaagaggtagaaatggctaggctcttgtactaccactttgcacagtcattgactagagatagatctttgatcaatgtagagattttcagccttggcattgttgacatttgggactggatactttgttatagggggttgtcctgtgatttgtaagatgcttagcagcatcctaggcctctatcccctagatgccagtagcccagcctccctgctattagttgtgacagtcaaaactatctttagacactgccatatgttccctagggaagggcctaatggtatataaacaaccctatggtggcatagtccaagttttgggacagggaggagtgttctatactacccttactggaaagacctatgagctattcagaaatctgaactatttaagatggagctttgttctgtggctcctggaattttaagcacacccctgtgaaacatcttgttaggatatactccactctccaaaacaatccataatgtttaaatagggctgttttattgattgattgattgattgattgagatggagtctcactctgttgcccaggctggagtacactgtcacgatctcggctcactgcaacctccccctcctgggttcaagcaattctcctgcctcagcctcccaagtaactgggattacagacacccaccaccgtgcctggctaatttttgtatttttggtagagacggggtttcaccatgttggccaggctggtctcgaactcctgacttctcaggtgatccgcctgcctcggcctcccaaagtgctgggattataggcatgagccaccgcacctggccttatttttctttttgagatggagtctgactttgtcgcctgagctggagtgcagtggcgcgatctgggctcactgcagcctctgcctcccgggttcaagcaattctacctcagcctcctgaacagctgagattagagatgcgtgccaccatgcccagctaatttttgtatttttagtagatgcaggatttcagcatgttggctaggctggtctcaaactcctgacctcaagtgatccacccacctcggcctcccaaagtgctgggattacaggcatgagccaccgctcctggctattttcttttgagactgggtctcattctgttcccaggctggagtgcagtggcacaatctcagctcactggaaactccaccttctgggctcaagcagtcctcccacctcagcctgctaagtagctgggattataggcatgtgccaccctgcctggctactttttgtggagatgggattttgcatgttgcctaggctgggcttgaattcctaagctagaacaatctgctcagggatgttgtatatttctaaaggtatttttccttttgttgcaggtgacacaactaaaaaaaaacaaaggtatttatggaattccactgagtggtaatggatgatgcagttcaaataactaaggtaagagaaataaaaccagaactgtgaggaggcttttgccagccaagtagtgtccttaaataaagctaacatcacatgctttcctgcttcatttcgtttctaagctgtaagagtagcttatttttttattattataaacattgtaattatcctttaagatacttcttaacctgattatgaatcagaatcacttgaagagctttttttttttaaaaaaaaagaccaaagtcaggctgggcatggtggatcacgcctgtaatcccagcactttgggaggccgaggcgggcagatcacttgaggtcaggagttcaagaccagcctggccaacatggtgaaaccccatctctaccaaaaatacaaaaattagccagatgtggtggcatgtgcctgtaatcccagctactcgggaggctgaagcaggaggatcccttgaacccaggagacagaggttgcagtgagctgagatcgcacactgcattccattctgggcaccaaagaatgaaactccttctcaaaaaaataaaaataaaaagaccaaagttaatgccctgccagcattgaattaaagcttcttgagtagatcacagatgatctccaagttttttaagtgggaatgtaaaccaactctatagttttagaaaactctttggcaatatctgcaaaacatacacgtatctaataacccaggaatttcaattctaggtatccacctttgagaaatgaaaaatatatgtctacacaaaagtgcacatacaaatgttcactgcagctttatgtattatagccagaaaaactgtaacccaatcaggtgtccaaaaacaggagaatagttaaacaaattgtgatatatggtcaggtgtggtggcttacacctgtaatctaagcacttgggaggctaaggcgggcagatcagttgaccagcctggtcaacatggtgaaaccccatctctactaaaattacaaaaatgagctgagtgtggtggctcacgcctgtaatcccagctactcaggaggctaagacaggagaatggcttgaagccaggaggcagaagttgcagtgaggtgagatcacgcccctgcactccatccaatctgggcaacagggcgagactatgtatcaacaacaacaaaaaattgacatacactattgataacatggaattttattcagtaatagaaaggaacaaactaccagtagacatgacaacatggatgaatctcgtagataaaaggttgagtgaaagaaaccagatggacaagaaaaagtagatgtagcagaattaccgagtaaaactaaactacagtgataaaggtcatatccctacttcctctgacaggaggtgggaggttgtgactggaaagaggtatgagagagcctctgcagcaccgaaaaggtgttttgttttgttttttgagactgagtcttgctatgtcaccaggctggagtgcagtggtgtgatctcagctcactgcaacctccgcttcctgggttcaagcaattctcctgcctcagcttcccaagtagctgggattacagacacgcgccaccacgcccagctaatttttgtatttttaatagagacagagtttcaccatgttggccaggatggtctcgattgcccaacctcatgatccgcctgcctctgcctcccaaagtgctgggattacaggcatgagccaccgcgcccggcctgaaaaggttttacatcttaatgtgttcatatacatacttttctcatggtaaaatatatataagattaaatttatcattttaactacttttaaagtatacaattcattggcattaagtacattcctgttgtgcagccatcaccactgtccatctccaaaactttttcatctccccaaactgaaactccatatccattaaacactaactccccatttcctcctcccccagctgctggcaaccattctaccttctgtctctatgaatttgactataatagttacctcgtataagtggaatcatatttgtcatttgacatctggtttgtttcacataggtttatttcacaaaggtatcttgtttatttcacataggatgaccttgttttcaagtcatccatgttgtagcatatatcagaatttacattttatggttgaataatattctgttgtatgtttataccactttatgtgtatccattcattcactgatggacacttgggctgcttccaccttttggctgttgtgactaatggtgctatgaacatgggtgtaggctgagtgtggtggctcacgcctgtaatcccagcactttgggaggccgaggcaggcggatcacttgaggtcaggagttcaagaccagcttggacaacatggcaaaaccccatttctaccaaaaatgcaaaaattagccaggcatggtgctgcatgcctgtaattcccagctacttgggaggctgaggcaggagaatcgcttgaacctaggaggtagaggttgcagtgagcccagatggtgctactgcactccagcctgggtgacagagtgaggctgtctcaattgaaaaaacaaaaacaaaaacaaaaaaaaacacatggatgtacaaacatctgttcgagtccctgcttttagttcttttgagtatattcttagaagtaaaattactggatcatatggtaactccatgtttcattttttgaggaatcaccatgctgtttttcacagtactgcatcattttatattcccaccagcaatgcacaagggcttcaatttctttacattctgctttttggtgacctccataattctaaattatatgtatatgctgtttcttcttaattcttttattaataaaaaagacaacataattctttgcctctccagtgtgaaaaaatgggaatttaccttacactatccccccatttaatatttgtattatttcctgttctgctgctgtttattagtttcctcagacttctgtaacaaaactccatgaactgggtggcttaaacaatagaaatttattgtctcagagttttggaggctagaagtcttgcgggctgtgcgggagaatctgttctatgattttcttctagcttctggtagcctcaggcatcccttacattgtagatggcattctctctgtatcttcagattgtcttccctctatgcatatctgtctcttgtgtccaaatttcctttttcaaaataagtgcgctagtcattggattagggaccaccctaatgagctcatctcaacttgatcatatgcaaaaatcctctttctaaataagttcacattcacaggaactgagtagggggttacaattttaacatcttttaggggacacaattcagtctgggtgacagaacaaatctctgtctcaaaaacaaaacaaaacaaacccataaagtgattacatttctaactttcggaagtactcttcaacctcctttttttaggttaattttcagcactctttccttctttcttcctttcctttttccttttccttttttttttttttttttttttttactttttatttttttgagacagagtcttggtctgtcgctcaggctggagtacagtggtgtgatcttggctcactgcaacctctgcctcctaggctgaagtgattttcctgcctcagcctcccaagtagctgggattacaggcacccgccaccacgcccggctaatttttgtatttttagtagagccaggttttcaccttgttggccaagctggtctcaaacttctggcctcaagtgatccgcccgcctcggcctcccaaagtgctgggattacaggcatatgccaccacacctggctaatttttgtatttttagtagagacagggtttcacctgttggatctcctgacctcatgatcgccctcctcagcctcccaaagtgctgggattacagtcgtgagtgccgcgcccacttaatatttatgttattatagctaagtaaatattgttcactgtcaggccaggcagcattttctgggtttttatttctttctctgtaggttcaatgtcatagaccctgggctattcaaatgagaaaatgaagaaaaagtgaattctctctctgaaactatcagttgcttccaatcatgtctttatattttatatttgaaccgtaactttctcataaaattttctccctggagtttctaattttcttgtctatttgcctgttattatagtttcacttttcaccaagatctcaatcatacactccagcctgtcaaggctagttcaaaccatacactgtggcccaaatttaggctagtcgtacactccaatccgagaccagtgggcactgttttttaggctgtctacacagtcatattggtattttccttactggtttttctttgacgggggtgcaggggaggttgggtccactgatcttggatatcagtctttctttgtatttgttttttaaatcttactagaggctagggggcatggtggctcatgcctgtaaccccagcactttgggaggctgaggcaggtggatcacttgaggccaggagttcaagaccagcctggccaacacggcaaaaccctgtctctactaaaaatacaaaaattagccaggcgtggtggtgggtgcctgtaatcctagctagtcgggaggctgaggcaggagaattgcttgaacccgggtggtggaggttgcagtgagccaagatcataccattgcactgcagcctaggcgacagagtgagactccatctcagtcaatcaatcagtcaatcaatctatcttaccagagttcattctcaagtcacttactgagagaaaaggtacctggcagataaattttgactctttctggtatccgttttttgttgttgttgttgttgttgtttgtttgttttggagacggagtctcgctctgttgcccaggctggagtgcagtggcgcgatcttggctcactgcaagcttcgcctcccaggttcatgccattctcctgcctcagcctcctaagtagctgggactataggcgcctgtcaccacgcctggctaattttttgtatttttagtagagatggagtttcactgtgttagctgatctgccctccttggcctcccaaagtgctgggattacaggcgtgagccaccgtacccagcctctggtgtctgtttttaagaccctcatgttggagtgatggtttggttgactatagaattctaggttgcctattatttttcctcaaaactttgaagtcattgctccatttcttctgacatcccttgttgttcatgagaaatagaaagtttcatataggaaattaatttttcttcttttctggaagcttttatgttctatatagtctggaattccatagaggtgtacttggtgggccccttaatagatctgcagactcatagctctccattttttggttcttttctgtcagcagctttctgatattgagcttcctgggttgttcatataatgttcttatctattctgtcctttttaaaaactctttgcttttggttgttttcctggagattgtcataactttatctcctaatctttttttctctctttttttttttttttttgagacagggtctcaccctgtggcccagactggagttcagtggtgccatcacagctcactgcagcctcgagctcccaggttcaagcaatcctcccacctcagctttccaagtagctggaactataggcatgcgctactacacccagctaattttttttatttttagtagtgacagggtctcactgtgttgccctggctggtctcaaactcctgagctcaagtgatccttctgcctctggggactacaggagtatgccaccacacctggctaatttttgtattttttagtagagacagggtttcaccatgttgccaggctggtcttgaactcctaggctcaagcgatccacctgcctcagcctcccaaagtgctgggattacaggtgtgagccaccacacctggcctgctgttttttcttttactgtttcttaaactagtcttctccccgctttcttttcctgtatgaacgttaatagttgaccacagcattggccctgtaatactcttttgttctttgtatttcttcagttttatttagcctctgttgtgtgttcacacattcctttttatttgcttgatgtgtgtcccatcccttcttttgaacactgtgtggtcattaatgagagtgtggtaggattttatgtactgatatttaagaaaatgaccataaaatgttcttggagatggtctttaaagaccgggcatggtagctcatgtttgtaatcttagtactttgggtggctgaggcaggaggattgcttgagctcaggagtttgagaccagcctgggaaacatggggagatcccatctctacaaaaaatgcacaaattacccaggcgtggtagtacatgcccgtggtcccagctattccagagcctgaagtgggaggattgcttgagcccaggagctcgaggctgcagtaagccatgtttgcaccactgcactccagcctgagtaacagaacaagaccctgtctcaaagaaaggaaaaaaaaattttaagtagttgattaaaagaggtctttagggtgggctctaatttgatgtgactggtgtccttgtaagaaaaggaaatttgtacacgcagacatcagaaacaaatacacagaggaatgaccaggtgaggatacagtaagatggtggccatctgcaggccaaggagagaggtctcataggaaaccaaacttgctgacactttcatcttggacttctagcctgtacagctgtgagaaaataaatttctgttgttgaacccaccgagtctgtgatacttttatggcagccctaccaaatgaatatagacatttaagaaggcttggtgcattgcagcatttggtaaattattatgcatttcgttgtattgtgcatgtagtgccattactgagaatagcaggatggatgggaagcatcgagacaaagtaaaatacgagctggccactaacatatggtatgattttgtggtaggtgaaaaaaggattccagaagtagagtgcttatgaaagaaaagctcagtagtgtaagaattttacaccagtttgactttaacagagagtgagttcaacagtgaaagatgaggttgcaaatgtagtttggggacccatattaatttcctggtgctgcccaaacaaagtaccataaactcggtggctaaagacagcagaaatatattgtctggcagttctggaggcccaaagtcaaggtgttggcagtgttggttccttcttggggggaatctgtcccatgcatctctccttagcttccaagagccccctgtgttatttggattgtaaatgatcactcaaatcctctttcttcaattggcattttccctgtctgttttcacatgattatcttcttataaggacaccagtcatattggattaggggcccacagtactccagaatgacctcatctttatttaactaattacatcttcaacgaccctatttccaaataaggtcacatcctatggtactggggattaggacttcatatcttttttggggaggcatagttcaacccataacaggggccaaactgtgaagcatttcctatatatcaatccagatattttcaaatctattgtttattcagtgggaaaccattgaaaactttgagcaggatgaatctaacactttaggaagactccttggggatggggttggagagatgttagctgcactggaagtcagtagaccagagtctggaccactgggagtctggaccagatcaatgttatggaaaaccaggattctggggctcccactcaagatatcccaaacccaaatcttcagactggagacccaggactgttttttaaaagctccctctctctccctgtgagtcagatgatttagcctagcttggatgtaacactgggtgtgaggtgatagaggcatgaaatgggttggtggttatgcaagtagaaagaccagagagaacctgggaaaagagacatttcgaaaaagtagtatgtaaactggcaccggagagtctgagacagtggtggaatccttaacagaaataaagatgtctagagaataaattgggtttaaagggaaggtaattaatttggtttacagtgtaaggtgatagacagtcagcaggcacttggagaatggtgatgtatgttcagaagtgagataatggaggtgataatcaaaaccctttgttttgatttgagcctttgtgtgggagaaaggatatggcgagaagaacagaagatcaggaagccaatactgtagaccctcattccctagcccctgaaacaaatggatttgacttctctgtcatgacacctggaacaaatgtggcattgcttacttacttcctttgccatgaactcagtgaaggcagggacgggtcttggcttgtgtgtgtgtgtgtgtgtgtgtgtgtgtaagagactgggtctcattctgttacccaggcatgagtgccatggcataatcatagctcactgcagcctcaaacgaacctcctccctcaggcctcctgagttgctgggactacaggcatgcaccaatggccctggctttttaaaggccatcatctagcacagtgcctggcttttcaatggaagtctgttgaatgactgactgactgaccgacttggaaaatgaacacatcaacttgagaataagaactttaacttttttcttccttgcatcccctaacatttaatccaatgcctggtccttaataggacccaaataaaattttgatgtgtgaatggtagaagaaaagctaaaattgagtagtcattgtgtcaaagagaaccaggaaacagagaagcttttgagaataagttgaccataacatgtcaaatgcaagtcaaggagaatgaaaactgagggcaggaattagatttaatcaggaggttatttgtagatttgagaacgaaggatttaagaacataatgaggttgttaagggagaatgaaggaattaagatcataatgaggttgttaagtagaggtggaaagtgaggaaatgaaagccaagtacatcttatacaagtttagtagtaatgaggaaaagagaagctcatagagttaaagctctaaaaatctgtttagaacatccgtgtctatttgtaaacaaaggggtatgagggttagggatggaaaaatggaaagtaccagaaggaaatgcataattttaggggaaagatctcaaatgggatcaagaacatgggcagtagccttaaaaaggatgagggaatctcttcctctagtctaaaaagggagaatagaggctctatagaggagagagaggtcatgtcctcttgtcagccatctgctcagagggagcttgggctgctgtgctagaaactgacataggaaactgacaaaggaaggatatgttttctgcacagcactgaggagtgtgatactcctaagcagtagttggcagcctgagataggaatggtggaaccagatggtaagtataatccaggaatcaggatggcactttctgtagattagggagttgtaggctgggggtgtacttttattcactcttctctgattcagaggttttataattttcactaacatcattaaaaacaatattggatgcctactacctgttggtttttattttaatcttgggaaaaaaaagtaaaagctactatcctgaggtttctggttttattggggagatagatcatatatgtaaaaagcaagtttagcaaatggcacatggcattatagactaagtcccaaatcagtagattacataaatgtcagagagattacaattatagcagtacactttgaggttcttttccccttagcttatgaacatttaaattttgtcacttttataaatacatgcctatttgagaggtaagaaaagtaccatgttgctttaatttgcttttctttgttagcaaagatgaattttttcagttgtttatcattattttactttttatgaattgcctattcatagcttttatccatctttccatggttgtgtttgtacttactaatttgtaaatacctcatttaataaggttatttaaccttttgcctgtaacattttgcaaatgttttttctagcttgttttttggggttctttcttttggttggttggttggttggttggttggttgggttttttttttgagacagatcatcactctgttacccaggctggaatgcagtggtgccatctctgctcactgcaacctccaccttctggggtcaaatgattcttgtgtctcagcctcccaagtagctgggattacaggcgcacgccaccacgcccagctaatttttataatttttgtagagatggggtttcacgatgttggctagggtggtctcaaaactcctgacctcaagtgatttgcctccctcagcctcccaaagtgctgggattacagatgcagccaccatggccagccttttctagtttttttaatttaaacattttctttcagatttcttattttgatttattttcagtttatgatgttttgttgacacataagagtttaaatatcttatgtattagaaactattaaatatttctttttaatatttaggaaggctacctcagcctgagaacagacaaatattttcaaatgttttcttcaaattgttttatagtttattggtacttatttacattccattgtattattgttatttatatacttaaaactttaaaccattttggaatattgcatgaaatagagacctaatttttgctgagtagttcagcagtttctagtactgtttactaaataatctatgaaaattttctgcggattcctaaatgattttgtccaggctggagtacagtggcacaatcatggctcactgcggcatctacctccccaggctcaggtgattgtcccacctcagcctctcaagtagctgggactacagaagtgccactacacccagctaatttttgcatttttttgtagagactatatttcaccatgttgctgagcctggtcttgaactcctgggctcaagcgacctgcccacttcggcctcccaaagtactaggattacaaggcatgagccaccgggtattttttatcatattcccaatacttatgtatacagacttccttgtttataaatctgtatctgtaccattgccacatattattgtattaatataatctcatagtgcaaatacttgttcattatttgttttaaataatgcctagactacactcacctatttgtatatgtgaactttttttaaaacattttattttttaataatttaagactcagaaagctgcagtagtacaggttcccaggtatgcttcacccaagggctttcaattagaacctttttttttttttttttttttgagatggagtctcgctctgtcaccaggctggagtgcagtggcgccatctcagcacactgcaacctctgactccctgattcgagcaattctcctgtctcagcctcccgagtagctggaattacaggcatacgccaccacacccagctaatttttgtatttttagtcaagacggtgtttcgccatgttggtcaggctgatctcaaactcctgacctcaggtgatctgcttgccttagcctcccaaagtgctgggattagagtggtgagccactgtgcccggcccctgaaatcaccttttctgtaatgctactttgttcaataaaaataacatattaatatcctttttaaaaatacatacaatatattgttattaactgtagtcaccatgatgtacaatagatctcttgaacttattcctcctaactgaattttgtgtcctttgttcagtatttccccaattcccctacccaccaacctctagtaaccaccattttactctctatttctatgaattcaactttttacattccacgtgtaagtgagatcatgtgatatttgtctttctatgtctggcttatttcgtttaacataatgtcctccaggtttatccatgttatcacaaatgacagaatttattctttttttaaggctgaatagtgttccattgtgtatgtatgccacattttctttcaccattcatccatcaatgaatgaaaacacttaggttgatttcatatcttagctattgtgaataatgctgcaatgaacatagtagtacagatatctcttcaacatacccatattagttatatcctttagatatatatccaatagggggaattactgaatcatatagtagttctatttaaatttttttttgttttttaattttgtttgtttagagacagggtctcgctgtgtctccaaggctgtagcacagttctgcaatcataactcactgtaagctcaagtgatctacttcagcttcgctactacaggcacatgccactatagtcagctaatttttaaaaattgtttgtagagtccaggtgtggtggctcacgcctgtaatcccagcaatttgggaggcctaggcgggtggatcacctgaagtcaggagtttgacactagcctgactgccatggtaaaaccccatctctactaaaaatacaaaaaaattagccgggcgtggctgtgcatgcctatgatcccagctacttgggaggctgagaggcaggagaatcacttgaacccgggaggcagaggttgcagtaagccaagatctcgccattgcactccagcctgggcgacaagagtgaaaatccaactcaaaaaaaaaaaaaatcgtttgtagagacagggtctcacaatattgaccagtctggtctcaaactcctggcttcaggcagtcttcctgtcttggcctcccaaagtgctgacattatagccatgagcccctgcacccagccttatttttaattttttgaggaacctccatacatgttttccataatggctgtacttatttaccttctcaccttattgtataatggtgcatatctcagaatgtgtccttactgagtgacacataactatatttgaagtaagtttcttatagatagcatatagttgggtcttttcttttctttttttaatagagacagggtcttgctatgttgcccaggctggttttgaactcctgggctcaagcagtatgcctgcctgggcctcccaaagtgttggtattataggcatgagccaccatgcctggcctaggtcttttttttttgagacagggtctcacttttgtcacccaagctggagtgccgtggtgcaatcatggctcactgcagcctcaacctcctaggctcaatcagccctccacctcagcctcctgagtagctgggattacagatgcatgccatcatgcctggctaatttttgttttgtttggggtttttttggtagagacagggttttgccatgttgcccaggctggtctcgaagtcttgggctgaagtgatccacctaccttggtctcccaaagtgctgggattacaagcgtaaaccattacacgtggtctagttgggttcttttttaaaagaatcagttctactaatttcttttcgttggtatgtataaaccatttatatttaatataattattgatactttggatttaaatttgccatttttgtttcattcattatttttgttcttctgtttcccctttcctgttttacagtgggttccttgaacattttttaatatttcattttgagtgtatctctttataaagttttttgtgtgattgctctaggaatatatatgtagataacttattacagtctattaatatcaactttttaccaccttaagtagaatgtagttagttttagtagaaggaatcttttagttccttctacctttcttcttctttttttttttttttgagacggagtcttgctctgtcatcaggttggagtgcagtggcgtgatctcagctcattgcaatctccacctcccgggttcaagccattctcctgcctcagcccctccgagtagctgggattacaggtgcatgccaccacacccagctaatttttgtatttttagtagagatgaggtttcaccatgttggccaggatggtctcgatttcctgacctcgtgatctgccggcctcagcctcccaaagtgctgggattacaggcatgagccattgtgcctggcacaccttccttctttatggtacagttgtcttaaatattacctctacatacaaggagaaccacttcagggactgctataatttttactttcaaccatcaaacataatctttaaaactcaagagaagaattgcttaattagtgtatgtatgtgtgtctgtatatgaataaacatatatatatgcataacatatatatggatatatgcatatatagacacacacacaccctttccattgctttttctttacttctatttgaggttttcttctgttatcatttacttcctttctgatagagtttctttagccattcttttcaaagctgatctgttggtgacacatttttagttttgttcatctgccagtatttgtatttcatttttatttctgaaggatattttcactgtctatagaattttagcttgatagttattttctttcagcatttgaaaaatattgtatccatccttgtggtttccatggttcctgatgaaaaatctgttgtctttcaaattgttattctcctatgagtgatatgttgtttctctctaattgatttcaggacttttctttagtttttagaagtttgattctgtaagtttatatctaaatctgaggctgagtgtggtggctcatgcccataatcccaacactttgagaggccaaggtaagaggatttcgtgagtccaggagtttgagaccagcctggacaacatagtgagaccccacctctaaaacagatagatagatagttgattttgtttttgttttttcctttttttgagacggagtcttgctgtgtcacccaggctggagggcagtggctcgatcttggttcactacaacctccgcctcctgggttcaagcaattctcctgcgtcagccacccaagtagctgggattacaggcacccgccaccacacccaactcattttttgtatttttagtacagatggggtttcaccatgttggccaagctggtctcgaactcctgacctcaggtgatccccctgcctcagcctcccaaaatgctgggattacagatgcgagccaccgtacccagtagacagtttttagccattatttcttaaatttttttttttcatctctccattcattctcttactcttgggaccctgatagcatgaatgttagatctttgttattatcccacaggactttgaaactgtgttcatttcttttcaatctactttctctcttgtacagactggatgatttccattcatttaagtttactaattgtttcctttatcatttttcttttgctgttgagcccatccagtgggtctttttaatttcagaaattttatttttaaaaattccatttggtactccttatgtcttctatatgctgagtgtttataatgtcttgtttgagcagtttcatgagcgctgttttaaattcttttcaaataattccaaaatctatattatcttggtattgtcatctgttgattgccttttttcattcaagttgagattttcatgttcctggtataatgagtaatgttggattgcatcctagcacttggaatattgtgctatgagattctggttcctgtttaaatttttatatttaacagtcaacctgtttaggtttagaacacataccctgtcccacttttgtcgactgtggttcagttttcagtcttgttttactcttatggtctgtgctaccgaaaggccagtctgaaatttaggtgttattccggagcagtgttcagttcttatgccttttgctgtgttgtttctggtcatttttacacatgggttgctcagaggcacttttaggatttcatacacagattcagagaattcatttctctagctctctcctcaccataatcctttcccaattctgtagttttgctgggattaggactccatctggttattccagggtagagaaagatgagttcacccacattctctgcagctgtaacatggagaagaggggaaaggcgtgccacctcattatggcagagttgtgttggaaggcagaatgctgttcacaatttctgggccacagtgtctggtgaggaaaaggaggggtacctcctccccttttttagtttgcctggtcaaaatgtttttgtctgctgagctgcccctttcccagttctttacctagagagggcaggcttttcttggcactttcttgtctgtgcttactggatctttcagattgtggcttcagagcttgggctaggacatattagaagttaaaccaaaccaaacaaaaaagtagggagcttcctgttgggtcagtcctcatgtcccctggtccctagccaatctaccttcttttttctacttttcagaatttttctgtcacttgtgtcatgaatttcatctagaatgttcggttataatcggtgggaagggctgggcgcggtggctgacgcctacaatcccagcactttgggaggccaaggcgagcggatcacctgaggtgaggagttcgagaccagcctggccaacatggtgaaaccccgtctctactaaaaatacaaaaaaaattagccgggcatggtgggggacgcctgtaatcccagctacttgggaggctcagataggagaatcgtttgaacccaggaggtggaggttgcagtgagctgagatcgcgccactgcgctccagcctgggcaagaagagcaaaactccatctcaaacaaaaacaaaaacaaaaacaaatcagtgggaggaatagggtggaatatgcttactccatcttttcctgaactgtaaatccctgctgcaattttaaattatgaactttagttccagtagttttttttaacctatgtacgtagtctttcaaatacaaataacagttaaggggttttcccccaataattatatcttgttttcttttcttttcttttttttttttttaaagagaccgggtctcgctgtatcgcctaggctggacttgaactcctgtgctcaggcaatcctcctccctcagccttccaagtatctgggactacaggcatatacccccatacctagctgttttcttatcccattatctacttttagaacaaggattggcaaactataatctgtttcccatatccagctcactgcttattttggtatggcagacaagctcagaataggttttccttttttttggagacaggtctcactttgtcactgaggctggagtgcattggtgtaaacacagctcacttcagcctcgacctcccaggctcatgggatcctcctgtctcagagagaaaaagagagagagaaaaaaagaaattatatgaaattcaaatttcagcgttttattagaatatgccatgttcatttgtttatatattgtctgtggctgccttcatggtacgacagcagagttgagtagttgaagcagagacttaattgccagccctttttccagatgatttgtaaatcctagaagtgaaaccattgtccctttcttgtcctgctttagtgatactgatatttcaagatacataattttcttgggtgaaagtttcttttgtttctggtttctaggtatttgtgagatatttctctcacaaaacgtgttcttttcttctggtttttttttgggggttttttttgtttctttggttttttgagacagtctcgctctgtcacccaggctggagttcagtggcgcgatctcaactcactgcaacctctgcctcctgggttcaagcagttctcctgcctcggcctccctagtagctgggattacaggtgcctgcaatcacgccaggctaatttttgtatttttagtagagatggggtttcaccatgttggccaggctggtcttgaactcctgacctcaggtgatctgccctccttggcctcccaaagtgctgggattacaggcatgagccactacgccttgtctcttttcctctgttatctgacttactggatggcatctgttaggtaaatcagaaaccaaagaggagtagcattcagcactccctgtcaccccaagagcaaatctattatcacaccctgtgcagtttacttcctgaatatctccttccttgtaacacttttgtgtctccaccagtaacttctaactggactgtccacatccagtgctatattctctacacccagctaaatgaagtgttcattccaaaatgcagggcagggaggtcactgtcatgcttctgttcttcaaaggcttcttaatgcttatgggacaaagaaaaatcacccttgtgtggccctaccctgtatacatctccagcttcctggcacctgctcccccttactctttatacttcagacacggtggcttctttcagaccctgctcctgccctttctgaggttacggactggcatggagttccctgccctccttaatgcctccctgattcctgttcatcttctacttgtcagctcaggaatcagtgccttagggaggccttggctgagctccctgactaggtcaaattttcttcttctataggctcttagagtcctataattctcttttccatcacttctcctatttgtctgtgaggtgatttgtttaatgtcagttttctgctactagactgtaagcttcatgaagatagggattctgttagaatttgttcactatttctagtagaaggaacagggcctagcacatagtaaatactgagtaagcgggttatttccccaatgattgcctttttaaagaaaaccagttctgtaaaccagcattcatcaggcttatcatatggctttttatattttgaattatttttgtgaggatttttattaatatgttttccaataatggaccatggttaaatttttgaagtaagccttacttgatcaggttgtggtataattataacatatgctgctttttctttgctaggattttaagattttgcagttaaagttattttcttttttgtgtgctttgtcagattttgacatcagtgttatactagtattttcatggcttattttattccattcttttattttcaacttttctatatccttaagcttaaaaatgtctcttttaaacagcatataattgagggcttttattattaggctttataatttttgtattttaattggaacatttagtttgtttaatatagttaatatattctttgctttctattttcctcaaagatttgaatagaacaaaaggctgacctcccccaagcaagagggaattctctggcagtctgcctttgcacttgaaatgcaactcctccctgaatctccagcctgccagcctcttctattatgagtcaattccttaaaataattctatatgatatatatttaatataattaatatataatgtggctactacctagtagaattaatgtatacttaatatgacatataatataattacagtagtaccttcttatctgggggaagcattatattccaagacccccagtggatgcctaaaaccacagatatatattttcctatacatacatagctgtgataaagtttaatttataaattaggcacagtaaaaaattaacaataactaataataaaatacaatacttataataatatgccagcatgttcctttttctcttttttcttgctttttggattgatagacttttttactatcctagcttttttccctcttgccaagttatagaccctgttcttttagtggttaccctacagattacaacacatagcctgcatgtataggaatgaaatacagtttacgtagggttcagtaccatctgtggtttcaggcatctactgggagtcttggaacatatccccccaccccccccccagataagggggtagtactgaaattatattaaatatatgcttattatattaaatattagtcatatattacatacatattatatagatttattttaagggattgattcacagtgggggaggctagcaggctggagacccaggaaggaactgcacttcaagttcaagggtagtctgctggagaattccctcttgcgtggggaaggtcagccttttgtgctattcagaccttcagttgtatggatgaagcccacctacattatggagggcaaccttctgtactcaagagtccattgatttaaatgtaaatctcatccaaaaaaacccctcacagaaatatccagaataacctttaaccaaatatctggacactgtggtgtggcccaaccaaattaacaatcacaagtctactctttatcaacttggcacccatacacatctccttaaaccattattaatctccaaataaagacagtaacaaagtcatacttctgcttagcatgaaagaactatcttgcatgtagccgaaaacacactattcctttctctaaaagaggatgcagattatttggttgatgtttactcttcttgatatcctgcaacttaaattctaaagtttaagaaaaagttaatacttaagtattatgatcagctgttaatctaattttttttgacgaaaatattttcgtatccattttctattgctgcctagcaaaacatccccaaatttaatattttaaagcaacaaccatcaaaaattggctcacaattctgtgaatatcaatcaatgctgggtagctgtttggttcctctactggtcttttttttttttttttttttagacagggtctcactctgccacccaggctggagtgcagtggcatgatctcggctcactgtaacctccgcctcccaggctcaagcaattgtcctgtctcaaccttctgagtagctgggattacagacacacaccactaccacctggctaatttttttatttttagtagatatagggtttcaccatgttggccaggctggtctcgaactcctcacctcaaatgatccacctgcctcggcctcccaaagtgctgggattacaggcgtgagccaccatgcctggcccctctgctggtcttgattgaagtcattcatgcaactgtaatcatctaatggttcatctgggactgagattgtctcaagcacatgtctggcagttggtgtcacttgttgattgggcctctctcttaacgtaaggaagtgagccaaagcttctcacattatgacagcagtgttcccatagagccaaatgacagctgtaagttctcttgaggtatcaacttggaagacacaccattacttctgcattttattggtttaagcaagtcacagggccaactcaaattaaaggaatggagaaataaacttcacctgttgataggagtggcagtgtctcactgtaaaaggcatgtgtacaaggatgggattttacgtagccatctttgcaaacagtctaccacagtgtcttttttcctttcgagtgcttaaaaaaattgtttttaaataattatttggttttcagaaatttcactattgtgtatctagacacagatttcctttttatttatctgtttggggggtgtttagggcttcttggatctgtggtttgatgtttttcctcagttttggagaattttcagccttcgtctgttcttcgaatatttcttctgttccatttctccctttccgcttttctgaaactgaaattacatgtaggttagatcatttcattgtatcctttatacctcttaccttctctttggtatttttttataaatctttttgcttctctctgcttcattctagatacttccttttgacctatttaccagctcactaattctctcttcaggtatattttacctgttcttaaatttatccattaagatctttttttcagatctgctattacatttttataccattcttgactaaaattcttaatgctacaggactgttcttcttgtctgtttcttactgattctcatgttgcctttttatggactagacactgtagttttaaaattatttatagaaatgacctgagacctatgatatatttttcaagagaggatttacgtttgtttctagctttgcctaggagtcttcaatcattttaattcagtttcagggactgatttgcttttaagcagggctgtagtccctacaggggtggtcaacttcatttcactacctaatatacctattatgtgtggagtactttgctagatgttgggtaggtcttgtgagcagagcagacctctctttggtctgtatggagcacggagcttgattataattggcaggtgtgtgtgtgtgtgtgtgtgtgtgtgtgtaaataaataaatatttatttatttatttattataggccgggtacagtggcttacacctgtaatcccagcactttatgaagtcaaggcaggtggatcacttgaggtcaggagtttgaggccagccttgccaacatggtgaaaccctgtctcttctgaaaatacaaaaattagccagacgtggtggcaggtgcctgtaatcccagctactcgagaggctgcggcatgacagtcactcaagcccgggaggtagaggttgcagtgagctgagattgtgccactgtaatccagcctgggtgacagagtgagactccatctcaatatatatatgcgtgtgtgtatatatatatatctatatctttaagatagatatatttatatagctaagtaattaataaatatattaagttctatgaaagcaatgagtaggctgctatggttgtgaatatttggactacacaggggataagaatgggtctaccataattagcagggacaggttttgtttaagccaaaaactaagagggcttagaacagaaaccgccaggcagaagcagttaccagtgtgaagactagatgacaaccaaaaaagtatgtgggaggagggaggggaggttgcgcagtggggagttgagattgacttagaactgtattaatgagctttccccccaacccccatttttctcccatttaccttcagaaaaattagtgatttggctaccagtgaatctaggctccaggtgtagctctgtagttttggactagttacctaattcttcattcacaacaaaacagaaggagagaggaaaaagagagcaaacatggaattgggatgggaagtaagagagcacatgaggagagagactatgtcaagtttcttcgtattccttttttaattacagaagaaaagatgggataaaaatattccatcttatttctctgtttaaaagaaagagtaggccgggcatggtggctcacacctgtaatcccagcactttgggaggctgaggcaggcggatcacaaggtcaggagtttgacaccagcctgaccaacatggtgaaaccccatctctactaaaattacaaaaattagccgggcgtggtggcgcatgcctgtaatcccagctacttgggaggctgaggcaggagaatcgcttgaacccgggaggcagaggttgcagtgagccgagatcacgccactgcactccagcctgggcaacagagcgagactccttctcagaaaaaaaaaaaataataataataaaataaataaaagaaagagtaaatgaatcaaaatgaagagaagccattttatctgcctcctggatgaagagtttcattgatgaacctgaaatgttttggttaacatgagaaaggagggtgagaagatgcctgagatgtgagctccttgaggacaggagctgctttctctctccagcctggcacaagacaaggaacttagttgaatgaatgagcaaataagtggttctctgctttgaaggaacttggactgtcattaccttgcaaatcaggtttaccatttatttgctttatataagttccagaaagaaactatttcctctcataatattactaccctaaacttctggtctgatctatggattgtagagcttaaatttcctcaaaccccaacagtcagagattgttacaccaagataaatagcatatttctcagcgccttgtattttctgtctttggccacagaccttaggacttaggctgatatttgagaaggaaaaactggaatttagtagaattatacttcctgtatcttaattttccaactcttatataaggtttgctttttctagagagagactaatctggaatgagaatgaattctcatcagtaaaggcaaagctttaagtgggtcatctgactttgcttttgtgctctacattcaccctgctcataaaaggtcctttcatgagttttctaggctttcatcactgccagcgtctccacaggcattgtgaaagtattaaacttcctaccctcccccatgcttgtctcatggactctttcgtagagtgcacagtggactgtgtttagctcagcaggaactctttgcaaacactgaatacatgaacaacccccctggaaagataagagatttcagtattgcttggtgtcatagccgcagaagttagtgtctgccagtatctgatgaatatggtgacttgcagcctaatttttgtgaaattatgaggccaaagtttaagaagtgttcatgttaaagttacttatatataaaatttgcctatcgataatttctgtcaataggaggttgatgaatgcttcacataacctagatactcctaattaactgttttttatttctttttttctaggacacatgttcaaagagcataattaactttttaaaagaagctagtaagtactgaaatagttttttaagttttttctacaagaatagaggaagaaaggaaacatggaattctgaagggctacttagcaagctgcttatggcataatctggggtgggggtgcatagtaaaggatttgcattttactgagaccgatacatgtcaagggaatggtatttaaaattagtgatatgtgttgatttttcaaggactatagcccatcaactacaataggctccaaaaaattctggtgaaattagcttcttggagccttccagtttacctactatgttattcccactataaaatattctcaacttttggggttttagccacttaagttttttattttctctaatgtctctagtatctgctttagtttcctgtcaatgctagactctgtggttcagcagttcatccattctcttcccagtactcaacctcgttgcttatagtttcattacattcatctagcaaaaccttaattctgtatgtttgccataccattagtgcttagagcattttttcagaaaagaatcctggaaaaatggatcttatctcacctgggccctcaggactgctgggctgcctggtgtcagcacttcccgccattttctatagcaccagtattattcttaatactttaaaaaaccaccaggcacggtggctcacgcctggaatcccagcactttgggaggccaaggtgggcggatcacaaggtcaggagatcaagaccatcctggctaacacagtgaaaccctgtctgtactaaaaatagaaaaaaattagctgggcgtggtggcgggcacctgtagtcccagctgctggggaggctgaggcaggagaatggcgtgaacccgggaggcggagcttgcagtgagccgagattgcaccactgcactccagcctgggtgacagagcgagactccgtctcaaaaaaaaaaagtaaataaaaataaaaaaccatatcccactatctcccccttctctctttgcctgtgatcttgctgcatacttatggggaaatctttaagatgtcagatttcagttctctcacttttctacaacttctcccacttttgcctttcttatgtaccttcccttccttcccatctgattccttatcagtatttacacatgattagttcttgcctaacctaatagaccctttcttgagtgcaaatcagtggctatttttgctagggtataaaaattacctatctaatcaccttgacaaagttaccctgttatttccaataacttacttcctatggattcttgtagattttcttttttttttttttaatttttttattttcagatgttttctcgctttgtcaccatgcctggcctaaattctcgtaggttttctatgtaaacaatcagattttctgcaagtattagtctcctttctaattgttataattttaatttctttttctttttaaaatttttcgtagagacaaggttttgctatgttgtccagcctggtcttgaactcctgggctcaagcaatcctcccatctcagcctcccaaagtgccattacagtggcatgagccactgtgcctggccaaatttcttttcttgttgcgaaggcagacttttcatacaatactgaatagaagtgatagtagattactttatttctgattttcaaaggaatgctttccgtttctctctgttgaagataattgcgtattgtttttttttttaaatagtaacttttatcaggttaaggaaggtttcttctatttctatttaaaaggattttttaaaatcttgaattcatatgtttttatctaatgcattttctacatcagttgaaatggttgtatgaactcttttaatatgggtgaattatatttatagattttatgttaaaatatccttgtatatcttggataaactcaactggatcatgatttatcttttttatatgctagattcaatttgttgatactttgttatgatttttgaatatatattattgtgtaaaagtgagcctgtgattttctttcttgtaatgtttctgtccagttttggtgcctggttttgctctctccttagaatgagctgggaactagtcactcttgttttctcacctataatagcatctgggtccagtgttttttatgtgggacaaatttgaacttgtggtcaacctctttaattgtaagaatattcaggtcttttgttcttcctgggctagttttttattctttttctagagattcgttcatttttcttagttttatttgcctataattgtggataatctgttttttatctgctacttctgtaattatttccacatttgatttataatattaacttgtgggccaggcgtcgtggctcacacctgtaatcccagcactttgggaggccgaggcgggcggatcacgaggtcaagagatcgagaccatcctggccatcatggtgaaaccccgtctctactaaaaatacaaaaaaaaaaattagccgggcgtggtggcaggcacctgtagtcccagctactcagaaggctgaggcaggagaatggcgtgaacccaggaggcggaggttgcagtgagccgagatcgcaccactgcactccagcctgggcgacagagcgagactccatctcaaaaaaaaaaaaaatttacttgtgtcttctctttttacctgtttgttaatttatcaaataactacttttggctttgtttcatttttattatacaataaaatgaaattcttttcattgtatttcttttcattgattattcctataattcttaaacaactttataattgatgtaacaataacctgtacacatttaaagtgtaaaatttattacattttgatccatgtatatagcagggaaatatcaccacaacaagagtgtgaacatataatctctccccaaagttttcttgtgtcttttataatcactgcctcttgcccctgcccactccctcatccttaagcaaccattggtctgttttctgccactatagattagattgtattttctagagttttatacaagtgaaatcatgtagtatagtattaaccatgtgtttgtttgtttgtttgtttctttctttctttcttttttttttagacggagtctcgctttgtcacccaggctaaagtgcagtggggcgatctcggcttactgccagctccgactccggggttcacaccattctcctacctctgcctcccgagtagctgggactccaggcgtgcccgccaccacgcccagctagtttttgtatttttagtagagacggggtttcaccatgttagccaggatggtctcgatctcctgacctcgtgatccgcccacctcagcctcccaaagcgctgggattacaggcaggagccactgcgcccagcaactatgtgtttctgatcctttgtcagggctagccaattcctagagacagtgaataactcactcataatctagctgcctcctttatgtcgctctcataggactttgacacctctctgctacaatccacctgccctgttcatttcaagatcaggtaccaggaaactcgggacatccctatgctgcagaactcactgaaattattcaaactagccagtcctaaacatgcttaccctgccttgcccattccttccgctgaaaccacataaaggctcttgcccatgttttcatcccattccattgacctccttactgaccctagctagtgcttcctcatgtggcccctgcatggcatggtgtgcaccttcctcttcggaactgcgagtaactgtcttgtcagcggcaatcatcttgtgatctgttggcctcatcatatttgaataacaataaaatctgttttaaggctgggcgcggtggctcatgcctgtaatcccagcactttgggaggccaaggcaggcggatcacgaggtcaagagattgaggtgaaaccccctctctactaaaagtagaaaaattagctgggcatggtggtgcgtgcctgtaatcccagctactcaggagactgaggcagggaatctcttgaacccaggaggcagaggttgcggtgagccaagattgcaccacggcactccagcctggtgacagagcgagactccatctcaaaaaaagaaaaaaaaaaaactgtcaaatgatactccaaaatggttgtaccattttatatttgcaacaacaatgtctgagggtactgattgctccatatccttgacagcacttggtatagctgatcttttaattttagtcactttagtgggcatatactggtattttatgttttactttttattttcctaatgattaatagtttgcagcatctttcatgtgcttatttccctttcatatatcttctttgataaaaatatctgttcaaatattttgcccattattttgttggaatacttattttcttactgttgagctttgagagttctttatatatctggataccaatcctttgtcagatatattttttgcaaaattttttcccagcctgtgatttagtttgttattctcatgtcttttaaaaaaaattgtagttaaaatatacacataatacaaaatttaacattttaactctttgtaagtatacagttttgtggtattaagcatagtcacattgttgtgcaaccatcaccgccatccatctctggaactttttcatcctccctgactgaaattctgtacccatttaaacactaacttctcattcccccttactccagcccctggcaaccatcgttctgttttccttctctatgagtttgactgctctaagtacttcatataagtggagtcatacaatattttcattttgtgactggcttattagtataatgtcttcaagtttcatccatgtggtagcatgtgtcagaatttccttcctttttaaggctaacattccatcctatgtatataccacattttatccattcatctgttgatggacatttaagttgcttcctccttttggctattgtgaataatgctgctgtgaatgttgttgtataaatatctgttcgagttcctgctttcaattcttttgagtatgttcccaaaagtagaattgctgggtcatatgttaatactgtatttagttttttgaggaattgccatactgatttctatagtagtggtaccatttacattccaaccagcagtgttcagggttccaatttgttaacattcttgccaacccttgttgttttctggattttttttattttggggttttttattttatttatttattttttttttgaggcagagtctcactctgtcacccaggctgaagtgtagtggcgcaatctcggctcactgcaacctctgccccccgggttcaagcgattctcctgcctcagcctccgagtagctgggactacaggcgcgcgttaccacgcctggctaattttttgtatttttagtagaggtggggtttcactgtgttaatcaggatggtctcgatctccggaccttgtgattcacccgcctcagcctcccgaagtgctgggattacaggcgtgagccactatgcctggccattttttatttttaaacaatagccatcctaatgggtatgaaataggttttttggtgttttgttttttttttttgagacagaatcttgctgtgttgccctggctggagtgtagtgacgtgatctcggctcacctcaacctccgtctcctgggttcaagcacttctcctgcctcagacttccaagtggctgggactacaggcgcccgccaccacacccagctagtttttgtatttttagtagagatggggtttcactgtgttggccaggctggtccacgatccatccaccttggcctcccaaagtgttgggattacaggggtgagccaccatgcacagccagggttttgttttgttttgtttttactatttttttttttttttagagacaagctgtctcccaagctgtagtgcagtggcaccattcgtatctcactgtaacctcaaactcctggacccaagcaatcctcctgcctcagccttccatgtagctacgtctacaggcatgtgccaccatacccggctaactttttttttttttttttttttgagagttttgctcttgttgcccaggctggagtgcaatggcatgatcttggctcactgcaacctcctcttcctgggttcaagtgattttcctgcctcagcctcctgagtagctgggattacaggcgcccgccaccacgcctggctaattttttgtatttttagtagagatggggtttcaccatgttggccaggctgggctcgaactcctgacctcaggtgatccacccaccttgacctcccaaagggctgggattacaggcgtgcgccaccacacctggcccccagctaacttttaaatgtattttgtagagatgaggtctcactgtgttggccaggctggtcttgaacttctgagctcaagtcattctcccacctcggcctcccaaagtgctgggattacaggcatgagccaccacacctggcccctttgcccattttaaaaattaggttgtttttgttgttgttgagttgtaggagctctttgtatattctgcatttcggttccttattggatatgtgattggcatacattttttcccatccatggattgctttttcattctgttatagtatccttgattcacagaagtttttaatattgatgaggtcctgcttagtctgtgttttgttttgttgcttgtgcttttggtgttatatccaagaaatttttgccaaatccaaagtcatgaagctttgccctctgtttccttctgagttttatagttttaggacttaaatttaggttttcgacccatttttagttaatttttgcaagtggtataagggaggggtccagcgttattgtttcacgtgtagatatacagttttctgagtaccatttgatgaaaaggctgtccattgaattgcttttgcaacttttatttgggcatatttatgtgagtctgttactggttctatattttactccattgatctatgtgtctattcctctgctaatactgtcttaaatatggtagctatatagtaagccttaacactgagtagatagatttctcccctttttttgttctttttcaaaattgtcactggtttgtttttattttttactttatgcagataatctgtactatactttggtttcatgtatcaagtagtttgttccaagttgtgctttaagcagaacaaataaattttcatattgttctttgtgttaatctgcaatataaacctataccaaattctattttgtgtatttgtttattgtagtaatctgactgactcttttgcctccagactcatctctttcaaggtccccaactgaatcttgttttaggtggaacttagaagcagtagaagttaagaatctatttcacagccttagtagtctagtttcattctctatataatgttgtctatgcaagtgagctgctctccagtgccttagtttcactaatgttggggaaggtctcttctcttgttttggacttctctatcacattgcctttctcaagagaagacatataatgaaagttgatatctggtgttctaggacttcttcagaagcttgccagtttttcaagctgatttctctcactggcaactcttcagagtgctgttcctactccaccctcccctggtggtatgtatcagttttctactcatcagcacccacctactcctgcctactgtgtttctcagatgtctgctgcctggctagctcattgctgcttttgtcactcatagagctgtcttcttccctttttttggctttctgcctgacttccagggcagctgctctgtcattgcctgtctgccattctgtcttttttccccctaccccccacagatacaacatctactctaataccacacattctccatgttcaaactaacctcatcactttccccaccacattccccaaaactggtcatcctccagcttatagcattgcagttcactgaagttagacatctgggccttgcttacctccaacatctcattagccttcgattctacccctataaatcctcttctcagtctcctttagatattcctgccctgctgtgagatccatctggtttattggctagattacttcagaaagcttcagtcagtgaccctccttacttcaaaccccaccagttgatccttcactctgccatcagtcattgcttctaaaatctaaattgttccatttaaccttgctgtgataaaacctttggtagttcttcagtgtgttcagtggtaagttaaaactttcactgtaatgtacaggccccttcatgatatgatcgctgcctcctcgagcctcattgtgtgcatttccccgccccaccctttcctcacccaccctagtctttcatgtctgccatttttacattcatttagcagatatttattgaagccccctgtgatgtccttacctaggtctttcttgttgccaggaccagacaggctttttcaagcttccaagtcatctcagtttgaaagactatgtctgacccttgtcttggccaattactctttatccttccaagttcaatgattgtcccactgcactccaaccagagtgagagagcaagaccctgtctcagtaaataaaaataaataaataaataaataaataaataaataaatcagccataatttatttaatcatgtctctctcccccattgatagacgttaagggtatttccagtattcttctcttgaaaacaatgctacattgaataaccttgtacatgggtcactttgaaagtatggatatgtatccgtggaataagtttccagaagtggaattgtgtcagaggggttgtgcatttgtaattctgatgaatatttatagattatatgagagtacctgtttactcaaactcttgccaatgcagcattatcaaagttttttatgttcgccagtgtgatagattaaaaaatggtatctcagccaggcgcagtggctcacgcctgtaatcccagcactttgggaggctgaggcgggcagatcacggggtcaggagatcgagaccatcctggccaacacagtgaaaccctgtctctactaaaaatacaaaaaattatccaggcgtggtggcgggcacctgtagtcccagctactcggaaggctgaggcaggagaatggcatgaacctgggaggcggagcttgcactgagccgagatcgcgccacaacattcgagcctgggcgacagagcgagactccgtctcaaataataaaaaaaaaagatggtatctcagcattgatttctttgatcatcagtgaggttgagcatcttttcatagatttaagagaactgtatggttttttgtgagttatgtttcatatcgtttacccattttacttttaggctggaagcagctgttttagtggaatggtggaacaagaagccagattgccatggagagacaactctttctagagatttggctatgaagcagagtagagacaatgatagctgaaggattgatgtagatgcaaagaaatttttcatcttctttgaaaacttaattgtgttaaaaactggtatgaaagggaggggttaaagctagagatggtggtagaaaaaaatgcagggttcctaaaggactgagattcctggatggaatttcagggaaggggaaaatttctggatatagtgactggggagttaagggtgtctagtccaatggcttttattttcttggaagggtaggcaaggccaacagccacatgtgtgggaggagatggttagaggggagaggaggtttgaaggcaccgctatggagaattggagagagctaaggaaagacagaaagactgcagaaagtgcttagggttccactgaagcggaaatagtgatttgtagtgatacaacccttatgagttatttgatttttttttttttttaagcagcatctggcagtccaagtatagggctgacagtttgggatttttctttccatgttggtgtaaaagaagaacagtgtagtgaaggaagttaggacaaaagaatgattgaactgacaccaagttttcttgatttggtagaaaaggaaataaagatagagcagagatattgaaaagaattagagaggggttcaagagactgaaggcctgggtgaggtcagagagcaggtgtggtagacataacagagagaactacaaggatagaaagtgtggttggagagtgggaaggcaagatttattcagtatgggggcttttctgggtgatgacagcatctggagtacagccattgtcgtgagtggcccaagtgtagcagagataaagcgttgttggagtgaaggaagtcaaggaactgagaggctggcctagatggggattttggttgtcatccatgaggatattgaagtcatccaggagaatagcaggcctgggggacaggaaggaaactgagccacttacagtgtcttcagtgataggaaagcacagggcaaaaagctttcaagaacagggactgttaagccgggtacagtggctcacacctataatcctagcattttgggaggccaaggcgggtggatcacttgaggtcaggagttcaagaccagcctggccaacatggtgaaaccccatctctactaaaaaaaaaaaaaaaaaaaaaaaaaaagaaatacaaaaattagccaggcatggtggcacgcgcctgtaatcccagctacttgggaggctgaggcaggagaattgcttgaacctaggaggcggaggtggcagtgagcctagatcacaccactgtactccagcctgggcaacagagcgagactgtatcaaaaaaaaaaaaaaaaaaaaagaacagggactgttagagcaggctccaggagaaatgctttgcatatggcattcttgaggagtgaggaggacctcaaccctacttcctgaaatggagctctgagatgttggagtagaaatttggaaaccagagagagaagtaaggatagtgttgttgcaaatgcattgtatatggggggtcgggaagtcacaggagtttgcctcaaagtctttctcggagacggatgaggttttcactgtgattttcctggtcgtggtctatggatatagtacctgttagtgacatggatcttcttaacttctgatgtgtcttttcctccctagtgtacgcataccaattctctccacagcttccatcaccatgcatttgttcttttcccttgttcttgtattacctttctggaaaggaatttttattgtaggctaattgttactcccaccagtatttaaccactggatatttcatatgattgatctcttctgatttggaaaataaaaatgtaatctcattatattcatttgattagtggggacagtcaacacttctttgtgtattttcttagctgttcgtttttctcgtctgtaaattatctgtttaggtccttcagatttttcaaaattggactgttatgttttcagtattgttatgagttcttgtttcaattatttatgacagttcattttcttttttaaaatagactttttttttcttagagaaataagaaaaaataaaaattaaaatagactttgtgttttagagagtttcaggttcacagcaaaattgatcaaaaagtatggagagttccggccaggcgcggtggctcacacctgtaatcccagcactttggaaggccaaggtgggcagatcacaaggtcaggagtttaagaccagcctggccaatatgatgaaaccccatgtctactaacaatacacaaattagctgggtgtggtggtgcacacctgtaactgtacctactcaggaggctgaggcagaagaatctcttgaacctgggaggtggaggttacagtgagccacagtcatgcccctgcactccagcctgggcaacagagtgagactccgtcctaaaaaaagaaagaaagaaaatatagagcattcctaaataccacctgtccccaacacctgcacagcctcctcattatccacatcctacaccactgtggtacctttgttgcaattgatggaccaacattgactcctcattatcacccaagctttggtgttgtacattctgtagatttggacaaatgtataatgacatgtgtctaccattgtagtatcatacagaagaatttgactgccctgacagtcctctgctccacctgcttactcctctctcccttttcctaactgcacaaccactgattttttttttttttttttgagacggagtctcactctgtcccccaggccggagtgcagtggcgccatcttgggtcactgcaagctccacctcccgggttcatgccattctcctgcctcagcctcccgagtagctgggactacaggtgcccgccaccacatccggctaattttttgtatttgtagtagagacggggtttcaccatgttagccaggatggtctcgatctcctgacctcgtgatccgcccacctcggcctcccaaagctgggattacaggcatgagccaccacgccctaccttttttttaaaaaacaaggtcttgctctgtcacccaggcctgagtgcagtgatgatcactcctcactgaagcgtcgacctcccaggctcaagtgatcctcccacctcagcctcctaaatagctgagactacacacacacaccaccatgcccagctaagttttgtattttttatagaaatgtggtcttgctgtgttgtccaggctggtcttgaactcctgagctcaagcaatttgcctgccttggcctctcaaggtgttgggattacaggcatgagtcaccgcacctggccttttttattttctttttttttttttaaccagtgatcttttactgtctccatggtttttcacattggcttctgtcacttagtaatatatgtttaagtttcttctacgtattttcatgtttttagcttatttctttttagcagtgagtaatatttcattgtctggatgtgccatcacttatttatccattcgcctgctgaaggatatcttgattgctcccagtcgtggcaattataaataaagttgctgtaaacatccatgtgcaggttttttttaagtggcataagttttcatctcatttggttaaataccaaggagcacaattgctggatcatatggtaagagcttatttatttttttgagagactaccaagctgccttccaaagtggatgtaccattttgcattcccaccagcagtgaatgagagttcctgctgctccatattcttacaaacatgtagtattgtcaaatgttttggattttaaaaccaaaatccattttcatagatgtgtagtggtatcccgttttaatttgcaattacctaatgacttgatgttctgtgtcttttcagatgcttatttgccgtactgtttatcttctttggtgaggtgtctcttcaggtcttttgcccatttttaatctggttgttatttttcttgttgagtttaagaattctctgtcctttgtcagatctatcttttgcaaatattttctcctagtctgtggcttatcctctgattctcttggcattgtctttcacagagtagacattttatattttaatgaagtccagactatcaattatgttctcatggatcatgcctttgatgttatatctaaaaagttctcgccatacccaaagtcatctagattttctcctgttatcttcttggcattttatagtcttatgattgatatttaggtctatgattcatttttagttaaatttttgtgaaagataataaggtctgatatggattaatttttctatatgtagctgtccctttccagtatcatttgttgaaaagactatcttgctccattttattgcctttgctcctttgtcagttgactatatttatgtgggtctgtttatgatctctgttccgttccattgatctgtttgccttttcttttgctaataccacagtcttaattaccatagctttaaagtaagtcttgaagtccaatagcattaatctttgactcttctttaatattgagttgccccttcagaatcttaatgtctctccatgtaaactttagaatcagcatttttatattcacaaaataacttgctgagattatgattgagattgcattgaatctataggcttatttgggaataactgacatcttgacaatattgagtcttcctgtccataaacattatttatgatgggcttcttctttatgtttaggagcttttgttttttctgtcagatattccacttctacctttatgatttcttaattgccttttatgcttagaaagtttttcctcatcctgagctcacatattcatttattttcttttaaaatgtgttttcaagcatttaatttttaaacctatgtggaatttattttggtatatggaatgaggtggtggtctaactccctcctctcaaatatgtagttatttttcccaaaaccattttctattaatttatcaagaatagacatgtatacatatacatatataatagtcagccttccacttgttgtttgacccttgtgaaggaaattgtatgagtttccaattttggattaggctcaggtagtaattgagctgggttctgccagagatccatgttaattcactatccaaacagagttataaaatgtaagttttatgaaaatctaacagtatatcactggtttaatgatcacagcctaggaagaatggggaaattgtcaaaatcttctgtggatgcacctgaaggccactgctgaacccatttccctgctaggcacggctgctggtaccaggggcaaactcctggagtatatatgaaccacctacatctccttctcttccccccctacccttgagattttcatgtgtcccttaaggatgtgtgtcctacttcccttggagagtcactaccacattgaacactttagactgtgagtcctgtgaagatggggctcatgagtgtattgctccccagttgtttctctagcactagctcagtatagggcataaaaatctgaatggatgaacaaaccactattactggtggggacatgctactatcttacatggttcgaggtggaataaaggttgagaacagctatataatgtgttccttgaagggcagcagtacatcagtgcaatcagcctaccttctccatacttctcactctgaaaactgtaaagctgcacctagcaatcaacttgggagctttaaaagggactgctccctagctctcacccacaaagctgtagtctagcacaggtgacttttttaaaaaagttttttggtccagatgtgatgactcacgcctgtaatcccagcacttcgggaggctgaggctgggaggtcacctggggtcaggagtttgagaccagcgtgaccaacatggagaaaccccatctctactaaaaatttgccgggcatggtggcacatgcctctaatctcagctactcgggaggctgaggcaggagaattgcttgaacccgggaggcggaggttgccgtgagccaagatcacaccattgcactccagcccgggcgacagtgcaagactccgtctcaaaaaaaaataaaaaaggagtcctattaagacttatttttacaggttggatatctctaatcccaaaatctgaaatgctccaaaatttgaaactttttgagcgcagacatgatgctcaaaaaaatgctcactgggacattttggatttcaaaatttggattagggactaggtgtgggagctcacacctgtaatcatagcactttgggaagttgaagcaagaggatcagttgaacccaagagtttgagagcagcctagacaacatagtgagacgccgtctctacagaaaattttaaaaattagccaggcatcgtagtacatgcctatagtcccagctactcaggaggctgagacagaaggatcacttgagtccaggaggtagaggctgcactgagctatgatcataaccactgtctccatcctgggcaacagagcaagaccctatctcttaaaaaaaatctgaaacactgctagtcctcaagataagggatagtcagtctttataaagactcaattagttattggatatctgaggaagcatgcatatcaggctcccaaaagatcattggtttaggcacacattttaatagcttggaaatccagaatactcttctggtgaccagctcagacatagtcctgataatataggacctcatctaacatgactccctattttccagataagcatggattcctggttcattcttgttctgctcggcagtggtctgatatgtgtcagtgccaacaatgctaccacaggtaaattgtcatttgataaggctgctatttgaaatgaaattttgctttcacatttaatgagccacatttgaaaaccgagatggtatttgaagaaaggaatataaaaattttattcaaagtgatggtaaaataggtgtcttcagaaatcttggaattgaatgctcagcattgtttttcatacatacataactgctttaaataaatcaaagagattatgtgttctttcctgaaaagtaaaataaattgttgacatttacaactctatatatggtttctgaggaactaagtgaagaatcttgtgtctttctcccttaaaccgtagtcctttggaggaggtaggaaaggtccagcatgagataaaaacgtagggggtgggtggtgttgagggggattggtctttgcttggtctccatatgtttgagagtttattaaggcttgctgctttgtgtctcacagctttttagcctcacattcttcatgtgctatttccttgttttttggtgtttgtagttgcaccttctgtaggaattacaagattaattaactcatcaacggcagaaccagttaaagaagaggccaaaacttcaaatccaacttcttcactaacttctctttctgtggcaccaacattcagcccaaatataactctgggacccacctatttaaccactgtcaattcttcagactctgacaatgggaccacaagaacagcaagcaccaattctataggcattacaatttcaccaaatggaacgtggcttccagataaccagttcacggatgccagaacagaaccctgggaggggaattccagcaccgcagcaaccactccagaaactttccctccttcaggtactagagatgattctgtttgttcttttgctctttgagtttagtcttccttttattatcttgtttgtgttttctagccttaaaatttcttcaaataagtaaaattgctcaagtgaagtaatgaaacctgtatgtggaatttttgggttagcatgagtgaagaggaaagaagaaagattctggagaatatctttctgctaggtgggatcctggttagattgagaggacttaaatgtgtttaaaggtagagaagaaggcttaaaaagacaagagaaatagaggagctcattgacgatgcaagagactgaagatgaaaagatacagagaatgagtaataagattaggtttggaaagggagggatccgtggagaccatggaaaggagaatgggtattgatgtccatgacagttagatgtgagatacagagaatgagtaataagattaggtttggaaagggagggatccatggagaccatggaaaggagaatggacattgatgtccatgacagttagatatggagtggcaggccagtggccaggggtggcatcaggctctgggaaatggttacattgcagtgccagttgttcagggcctcaggttgaagcagtagtcccaaggagaaaatcagagacgtggatctgagaccagggcaggtaagacaagtttctgacctctttgaaccttaggtaccttgtctgtaaaagaggattagagataccctcaaagggcttctatgaggagtaaaggaaataatcattacctgattgctatgtaactgtcatcccttttctagcaaaaatcactctttcctcttctgtgttcccagttagatggtgagtgcccctaagcagaatcacatctcgctcatgtggaacattcaggaactgtttgctcagttgattctcatttgttactacagatgatatcttttactgcgccttataactcagacccttcacctgccagcttttccccatattttctaccgtaaagacaagacagcatttgcagttaagagcacagtcttcagtgccacactgagtttgaatcccagctcttccataaaccagccatgtttatggcatagctggcttactttatctctctacctcggtttgttcatctgtgaaacaagaatgagtgatagtaatagttcttacctcatagaggagatattaggattaaacaagttaatatgggtaaagcacttataaaggtgcctacacatggtaagcactatttttaagtgtgagctgttagtattgttgtggttattgctctgatagttaccagtaaaatatatgaaggtacctttaatgcagatggcatcccactattcttgatgagataggggactgcagacaaataatgtctgatacttgctttgtgctttagagttaatgtagttttgtcatagttattactgtgtgctaggcatcgtactaagagttttctagaataatcctatgaattaagttctattttatgttttataggtgaaagtattttacaatgatgaaaccataatttgtggaatgtttttcagtgtacaggtcatgacacaattcatgaaatcactttagcaggccaccactagttgtttgttttgttttattttaatggatgatccagttccatgtttattcttttaatgttacatacaattttttgaaattttagtaacaacataaaatgttgggttgtggccattgcttagggagaaaggcaggataacttgtacaaactgtatgagtgaatggaaaaggtggagactgtaacacaggcctgactgactgaacagcccatgttctattgtgtactgtctttcatttaacagttctgtgacatgaccatggataatcatctccttttaacagatgcttgatttcagactgtatatagaggttaaatgatttgttttagatctcaaggctgacaaattaggcctatttctcacttttgcggtctttccactctgcttgtagggaacttagttttccataaactgacttaggtccaaattgtgccacagctaagaatctagttattgtacatttaacacagttcacgtcataggaggctgagactatgtttctctagtggcgtttattcaagatgagtaaaacacaagaaaccattatcgcacatgggaatttcatagtcttaaaccccacatcccacttatcaccaccatttaccagtcctcctgtaacagttacaattttttattaaatcagtatttgatgtatattattgtaattatgaaatattcattgctgagctataagtataaatggattgtttttcttgtacagttttttttctggatttaatacttaccttattttttgtttatttagttttctatttagtcaggccaggcacactggctaacacctgtaatcccagcactttgggaggccaaggtggacagatcacttgagctcaagagtttgagaccagcctggggaacatggtgaaaccccatctctacaaaaaatacaaaaattagctgggcatgggtgcatgtgcttgtagtcccagctactcaggagcctgaggtgggaggattgcttaagcccaggaggttgaggctgcagtgagctgtgttcataccactgcactccagcctgggtgacaaagcgagaccatgtctcaaaaaagttattgctactcaattcttaccatgctctccagagcctctcaaaacagctttctacaaagtgagatctgttagataatctatttcttttttacctctagaaattcctcctgagccctccattgtcttattccagtctaggcttgtcgatctctagggctactacacagatacatcagcctgagatttcccttctctgtcattctgggaattccccttgctgctgcttcctgacttccatattgtcttcctttttgtcttctcatcattcggtagattcctgagaaaaggggtccatgggaggcaaattgcatccttacatatctaaaaatatctttagggctgtgcatagaatttgaggaatatttttcccccagaatttttaaagtaatgccctaactgacacctgtttaccaggtttggaggattttactgctatcttaatccctaattgtttgtatgctttctaggatcttctctttatcatcagtatcctgaaatttcacagagatgtatcttgatgtgggtctttttcgttcattattatggatacttaataggccctttagagccttgatcttgcatttctgaaaattttctcccatttctttgaaaccttctccccctcttccttttttttttttctcaaattcttaatatttggatattggatgtatcctgaattaattctttaatctttaaaatttttcctttctgttgatctttgctttgagtctttttctccttttaaaaataaacaaaggccagctaggcacagtggcttatatctgtaattccagcactttgggaggctgaagcaggaggatcgcttaagcccgggagtttgagaccagcctaagcatcgcagcaaaacctcatctctacaaatgatttagaaattagcagggcctaatggctcatgcctgtggtcccagctactcagggctgaggcaggaggattacttgaggcctggcagttgaggctgctgcagtgagctgtgatcgcaccaccgtactccagtctgggcaacagagggagacctcatctcaaaaataaataggcctggtgtggtggctcactcctgtaatcccagcactttgggaggccaaggcaggtggatcacttgaagccaggagctcaagaccagcctagccgacatggcaaaaccctctgtctacctactaaaaataaaaaaattagtcaaacgtgttggcatatacttgtaatcccagctacttgggaggctgagacatgagaattgcttgaacctgggaggtggaggttgcagtgagtcaagtccctgcactatagcctggggaacagagtgagacccgagactctatctcaaaaaaaaaaaatcagtgacaagtaaaaaggtagaatacctttttttttttctttgagacagtctcaccctgtcgcccagtctggagtgcaatggcgcagtctcggcatactgcaaactctgccttcagggttcaaacaattctcctgcctcagcctcctgagtagctgggattacacatgcccaccaccacacccagctgttttttgtatttttagtagagacaggtttcaccatgttggccatgctggtctcgaactcctgacctcatgatccacctgccccggcctcccaaagtgctggtattacaggcgtgagccactgcgcccagcctagaataccttttaaaaataaataaataggccgggcgcggcggctcatgcctgtaatcccagcactttgggaggctgaggcgggcagatcacgaggtcaggagatcaagaccctcctggctaacatggtgtaaataaataggccgggcgcggcggctcatgcctgtaatcccagcactttgggaggctgaggcgggcagatcacgaggtcaggagatcaagaccctcctggctaacatggtgaaaccccatctctactaaaaaatacaaaaaaaaattagctgggcgtggtggcaggtgcctgtagtcccagctactctggaggctgaggcaggagaatggcgtgaacccaggaggtggagcttgcagtgagccgagattgcgccactacactccagcctgggcaacagagcaagactctctctctaaataaataataaataaataaataactccttttacaaaagcatatatattcattttttccatttataatataaataatagatatgctgagttgatttctgcatattgctttttcagttaccctatcatacttgctctttgttttagtaaagagctgctgtattgaaggatataccttaatctctttatccagtttccccatcagtggacactaagattgttttcagagtactcttataaacaatacagtttgtcatttcagacacatatgagaatattagcaggatgaattattttaagtctgcatttataaatttatggatattgccacatttacctctgctaggaagtctattcctattaacaatatgtcaaagtgcctatttttctaaactctcttcagtgtggtgaattgttaaacttggggatctctgccaatctgacaggtgaaaaataacatctcagtgtaagtttaatttgcattttgctgagattgagcaattttgtgtaatttaaaagatcatttatttttctgagcattctctgttgatattctttacccatttttattagagtgtcaaggttttcctgactcgtttgtagatgttctttgtacgtttgggaaatgagtcctttgcctatggtaaaactgcaaatgttgttccctaggtggtcatctagattttctgcattgcagaagatatcattagctatttttaatttttttaatttaaatatttctcagtttaggttttctaggaattgggtcatatctaggaaggctttccttactccaagattataaaaataattttcttctggacttctatggtttcgtgtgtgtgtgtgtgtgtgtacacgcacttaagtctgtctcgaatttattctgatgcagagtgagctatggatctgtttttccccaaatatctaacttgtcccaataccccttaataatttatttttcctcattgatttgaaatgccacctatcttatatattgaattcagatatttatttacctcttcatatgtatttgagtatttgggaacattcattttattttctattaatctttttctctgtccatgtgcaaagcctcactgtctcaataattgtaactttgtaaagtatttaatatccagtaaaatgagtcattccttgttaattttatttttcagaattttgttagcaattcttattataaacattagaattaacttgtctagcaggaaaaaaagtttgtattgatcatgttaaatacgtagattaacagagaaaatggcatcttacagatgttgagtctaactatccaagaatgcaatatattccattttctgaagtcttttttttttaaatcttctgtttttgtaattataaatggagcattttcttccatcagatcttctaactggctgctgttggggatatgaaggctactgatttttgtagagacattttgtactggccaccttaaactctcttagtattggaagtaattttcttcattaatttttatggcttcaagtcatctcatctgcatatatcttccaaatttttagaactttctttttcttctgtttaatcgcattgatgaatacctccagaacaaagttaagcagctggtaaatgcagacagcattctcttgtatctgacactaaggaggacactttcagtggtttttcattatacgtggtactgactcttgagttgagataaacatattttattgtgttcaggatttaatgagcgtttatgttaggaatgggtgttaaattttgccagttgcctgttcaggatcaatgagaaagatctgaatgattttttttctcttttggtctgtttctatggtggattctattcctaggtttgtttgtttgtttgtttattttgagatggagtctgttaccaggctggagtgcagtggcgccatctcagctcactgcaacctccacctcgcgggttcaagtgattcccctgcctcagcctccgagtagctgggactacaggcacgcaccaccatgcccggctaattttttgtattttagtagagacgtggtttcaccatgttggccaacctggtctcgaactcctgaccccatgatcctgcctcagcctcccaaagtgctgggattataggtgtgagccactgcgccctgccagtttttatttattcattttttagagacagggtcttgctctgaattaattctttaatcttcttaatttttcttttctgttgacctttgctttgctttaagtcttttcctttgagtcatccaggctgaagtacagtggcacgatcatggctcactgtaaccttgaactcccagacttaagcaaaccccacctcagacttctgagtagctaaggactataggcgcatgtcaccacgcccagctaatttttaaattttctcagaaacagggactcactgtgttgcccagactggtcatgaactcctggcctcaagcagtcctcagccttagccttccaaagcactgggattataggcatgagccaaggccgcccaaacatattgtatcgttcctgtaacaagctgttgcagtctatttgatattatttcttatttttttcatttagaattttctctgtctagatattctcaaattatctctaaatgagattgatctatgtttttcctttgtgtgtgtattctttttgataagttttagtttttagtgttttgttttgctacatggaaaggatttgaaagtttacactaaaaaatatgctttttttttttaagacaggctttttcactgttgcctagtgctggagtgcagtggcatgatctcggctcattgcggcctgcacctcctgggctcaggtgatcctctcacctcagcctcccaagtagctgggattacaggtgtgttccaccatgcccagctaattttttgtatttttttgtagagatggggtttcgccatgttgcccaggctggtcttgaactcctgggctcacatgattctcctgtcttagcctcccaaagtgctaggattacaggtgtgagccaccacatctggccatttcattcatgttttcaaatgtatttgaatgaggaaaagttctcccttgtgattatttattataatagcctacagagctattaatttttaaattttgtttactttatgtctcctttttttttttgtttaggctgaataaccatttatttcataggtttattgccttttttcttccaaagaacttgctattgtgcatttatagtccttttatgtttacgttttctatttcattgatttttactttctaccttctttagatttattttgttctttttctatcttcttgaattgagtgtgctttaattgcattctttccagttaattaacatatttagtgctgtgaattttgaacaagcacagctttagccacatcccataggtgtttctataggcagttgtattaggatgcgctataagctgctctgacaaagataccaaaattcagtgacttaaataagaccaaagtgtctttctctccccagttacattccagaggtagacagggccttcgtctcagtagggaccaaattcctttcctcttgtggccctgccatcctaacaatattgcccttatctgtttggttagagatagttctcaccattgggttctagttccaaccactgcgaaggacaaacaaagggaataggggccatttctcttccaaaagatgtgacctggaagttactcacattgctttagctcacatcccgttggctagaattcatcacatgaccacacctagcacaaaggagtctcaaatatagtctgccaggagagcttggtgctcagctaaaaaacaaaggttctgtatcaaggcaagaagagaaagagactgatctgaggggaggagagttggcaggttctgtcacaaaacttctcgtcattgttatttttaaggtatttttccattttgggttttttgtttgtctgatttttttttttttttttgagatggagtctcgctctgttgcccaggctggagtgcagtggcgtgatctctgctcaccgcaagctctgcctcctggttcacgccattctcctgcctcagcctcccaagtagctgggactacaggcgtacaccaccacgcctggctaattttttttttgtatttttattagagacagggtttcactgtgttacccaggatggtctcattctcctgactttgtgatctgcccacttcggcctcccaaagtgttaggattacaggcgtgagccaccgcgcccggccgtctgtttgatttttgagatggaatctcactctgccccccttctggagtacagtggtgtgatcttgggtcactgcaacctctaccctcccaggtttaagcaattcttgtgcctcagcctcccaaagtgctgggattaaagacgtgagccactgtgcccagcccattttggttttgatttttttttttctttgaaatagagtctcgctctgttacctaggctggagtacagtggcatgatctcggctcactgcaacctccccctcctgggttcaagtgattctcgtgcctcagcctcccaagtagctgggattataggcacccaccaccacgcccagctaatttgttttgtatttttagtagagacggggttttaccatgttggccaggctggtctcgaactcctgacctcaggtgatccactgcacccggcctcattttggttttgatttttattttcaaatgttttcttactttgtcaatttctaattttattgcattgggacaaaagaatattgtactctttctactgttggggtttataagggctgtggatatttcactcgcctttgaaaagaaggttttctctgttagtctgtagagtttggtatgtaccaattagattttattacttatcattttggtcttttgtatccttacttaattttgtcctcttgaattttaatggagcaaaagacataaagtcctctaataacatgcgttctgtttgcattctcatactttttatgaatattgatgctgcactatttgtgtacccagggagaaggccagaccactgtccaaagtttagtgaatctgggcagccttgtttcccagttgttggaggatgcctcatggaggaaagcattcctaatcctggagcttgttttgttgtactctaattgaattgtaatgtgtttctttaacctgaatgaatgtttctattttttacttattacacaggtaattctgactcgaaggacagaagaggtgagctgctcaccttatatctgttgttccttttacacagtgtacagtattcatttatttcctctgctcacagtctgtggtaaccgtgtgcatctgtggctgtgttgtttgtttactttcccttaagttatttccatgttaatctcatggagaagagcaatagaaacaagtactgtattcagtatgttttttaatatagactatggattctaacagctatgatgtattttaacaagtaacaaaatatatcttactttgacatgtcactttgttaacattactttttggtgatattaggtcataatttctataccattagttacttctgatttctaggccacagttccctttaaatattctttgtgttgtttttcccctagtgtataaaatgtcaaccctttgtggctttatatggattttatggattttcagcccttaaatgtaaagtctctatggcctgagatgttgtgtctgtggtttaagctggactgctgagtccctggtcactagagagtagggggacatgggtacttgtctgcagaagtgtggcacattttgcctagaatgacagtaaggctgctatcaaagagcatgagagaaagagaaagagatcatctaacattctaagaagtgattattacatttgagttttaaaaatgttactattcgaagcagtgtttttatcataattttctattttatcaaatcagacttgagttttttttctgattctgttatttaaccatacacaattttccctgtgtaattaagtaatggaacacttggaggcatatgaagtcccactaagtagggagcatttgagtcagaaaagtgggtactctcttcctttatgtgatgtccatctgccattgtatttggtaaggaatagtgaggtgttaccatactgtgtacagatttccctcacttttccacctctcactttcctaaacttgggaactaaacattggattaatacagtgtctttgctgttcagattcacttgccagattttatcaaatgtagacttaaataggttttattgtgatagatatttacttgctccctaaaactgctctcttaaccagccttacaataaagtcaaaagtcaaagtggtaggcttcaagatgaaacataagatctgttgactccttcctctatttagtatatattttcataatattcagccttttcttgccccagatatcatatctattttacctacccaatatttaagtagtttccatgttgtgattaagaaaacaaaattaccataattacctagattattgctaattgtgacatatgtaaagtctattaatgtaataaatctcctttcttaagtcaaaaaataattttgtgtaattccaaacaggaaactgaaaaggcataggtattctcagcagtctctaaagtcccaaaatctaatggcaattttaccagagcagatctttagaagtattgctataaatttggatatcccattctaattttaagccaaatgctttttgagaaataagccagctgtttggaaatgcttgtattataatcggtttgataagcagttatgtcttatgcagatgaattaggggctacctgtttttatgcactggtctttggggtgcttttgaacagtagtgtctgatgttttaattgtcaaagcaaaaagaaatgagagggagggcaacttttcttcctcttctgaagtccaggaaactggttattttctcatgcatattattttaaaatatattccagccaggtgcagtggctcacgcctgtaatcccagcactttgggaggccaaggcgggtggatcacaaggtcaggagttcaagaccagcctgaccaatatgataaaaccccatctctactaaaaatacaaaaattagccgggcgtggtggtgtgcgcctgtaatcccagctactcgggaggctgagtcaggagaattgcttgaacctgggaggcagaggttgcagtgagccaagatcgcgctcttggctgcgatccagactgcactccagcctgggtgacagagcaagactctgtctcaaaaaaaaaaaaaaaaatcagactcttaatatttgtaaagaagtagtccttgagctactacttaagtctagaaagagttgatattcttgttttaagagtgttagggcactttgggaggctgaggcaggtggatcacttgagcccaggagttccagaccagcctgagcaatatggggaaaccttgtctctactaaaaatacaaaaattaaccaggcatgtggtacgtacctgtagtcccagccacttgggacgctgaggtgggaggatcacctgagcccaggaaatggaggttgcagtgagccaagattgcgtgactgtactctagcctgggcaacagagcaagactctgtctcaaaaaaaaaaagggcggggattatcatagtgccattattattatgagtttatgatggctttctctaagcaccttttacattcggcatttattcagtacctattaagcatcaaggagtccagaaaaaattttatatataaatatatataaaatatgtaaatatatatatgcatatgcttccctatctcaggaaggaaatatgtgaacatcaggaaccgaagtctactcagttacatgccattggatatatcacacaaagtgctgagggaactcagaaggctcattatatctggggagtgggaaggaggcacagagatgtgctttgggaagtttaaattaaaatagcaaatggggaaaatgaagacacaccagacagggcacaagcaaagagacatgaaagagtaagtcatgtgtttgaggatctgtgcgcagttgacatgtgtgaggtgtggggagtgatcagaggtggcctcaacagaatgggtgtggtggtccactgagttcaggagttggagcatctcctgaagatgatggtgagtaaggaagtaacatagtcagattttggttttagaaagatattccagaggacttaggggagatagatggacaatagaaatttaggtttctgaataatttggctcaaaacaacggtgattgggctcaacccagtggttagattctagaggcaatccaatgaatattgctgtttttagagccaataggaaacatttaaaacaacattacaaccttgcctttgagagctgataaatacttgtaccaaaaagtgtggcaataggtaaatgggccataggaactggggctataggactatggctattcctttactgactagtttgtagttgaccagtgtgtgtctgaagtccttaagtcactcacctgtttagaggtgagcccttcaattaatatggccctttgttttcaaggaaagaagttatagcaagtaggtatctgttgtcccgggacaccattttagtggttttcattttcatgcttgctccctggcctgaatctagaaagtaaaactttgctggaatgaagttggggttgaaacagtttcggtttgtaaccatactgtctctgtctcatctactcagctctgcctttgtaatgtaaaagcagccatagatggtatgtaaatgaatgaacatggccatgttctgatagcattttatttacaaaaacaggcagtgggctaaatttgggctatagtttgccgacccctcttctaggcaaagaactgcctgagcgtaggaagctggactgaggttctctgctagtgtgtgaacttgtggatgccaaagccaatctcttcccttcatgtcagacactttgcaaatgttacctcttttagatctcccattaactctaaaaggtggagggtgctattatgcttccatttcatacattgttctaagagattatcacactactagtaagttaggatagtaggaatttgaacttcaggtctgtcagaccctaaaaccccatgccctggaaatggttttctaaggctggcctgtggttcgttggttgatttcaattagaatttaagaattttttcagaatacatctaggtgtaaagatttttttgtcaatattactccacaaactagattatttcttttggcctgataactcaggaactttcttgtattacttctctcccttcttactggtttcttctttggactctcctgttgcacaggtattggatctcctggacctatccagttcctttcttttctatgctgtcatatttttcatctcttattgctctgtgttctgggagcttccaggacagttgctctttcacacaactaatttggttttcagttatatcagttctcctatttagcctttctttttttggaggcagggctggggcagactcatgctctgtcgcccaggctggagtgcagtggcctgatcacagctcactgcagccttgacctctgggactcaagcgatcctccagcctcagcctcccgggtagctgggactataggcatatgccaccatgcccagctaatcaggtgtttgtttgtttgtttggtagagacagactaccagagtctcgctaagttgcccaggctggtctcaaactcctggcctcaagcagtcctcccaccctggcctcccaaagtgttgggcttacaggcatgagccaccgtgcccggccctgttaagcctttctatctagattttttccctcctaatcatgttggtgtttttttgtttgttttcatttttgttttgttttgttttgagacggagttttgctcttgttgcccaagctggtgtgcaatggcacgatctcggttcaccgcaacctctgccttccaggttcaaacgattctcctgcctcagcccccagagtagctgggattacaggcatgtgccaccacacctggctaattttgtatttttagtagagatggggtttctctatgttggtcaggctgctcttaaactaccaacctcaggtgatctgcctgcctcggcctcccaaagtgttgggattacaggcgtgagccaccatgcccggccagtttttaaagaactccttcttactactcagattactcctttttaaatagtggcttttaaaaaatatcaatgtaggctgggcacagtggctcacacctataatcccagcactttgggaggctgaggcaggctgatcacctgaggtcaggagttcaagaccaggctggccaacatagtgaaaccctgtctctactaaaaatacaaaacttagccaggcctgcagttccagctactagggaggctaaggtgtgaggatcgctcgaaccaggaggccgttgcagtgaaccaagatcacgccagtgcacttcagcctgggtgacggagtgagactccgtctcgagaaaagaaaaaaaaacgcaatgcagcagtggctcacgcacataatcatagcattttgggaggccaaggcaagaagatcacttgagaccaagagttcaagaccagcctgggcaacaacaagaccccctccccccatctctacaaaaaatttaagaaaaaaaatttttttaaatcaatatggcatcctgttgcacaaattgcagtatattttgaaagatttattctgtttcttttgtcacctccatttcccagggctactgttgctctgtttgagctatgccctggaccattgagtggcttagactgtgctcacaataggtgtcccttcatcccttcagaagacaaacatggacatacgtcctaaaccaggaaggggttcagtgatggctcaggaaaatcggggcagggtgcagttatcctctaggcgagctgccgttttctttttcctttcctctcttgtggttgcctagaattagcttgggcactactatggtttttttctgtctgcaggccccaggagaccttctgtggacccaatatacttaacaatcatatgcagtgtagacctgctctggtgtcaattctaaccaaaacaaaaaaaaagcatttatgagacactcagggaaattcaagcagtaactgaataatattagatgatactaaggaattagtgttactttttaaattggataatagtattatgtttatgttaagaatcttgatctcttggtgatacatacctaagtaattgcatttgaaatgctaggtctcggatttgccttaaaagaattcagttagaatggcgtgagtatagaccagtggttccttactgggggctatttcccccacaaaggcatttagcaatgcttggagatacttttggtcatcaaaattgggaatttgctacagacatctaataattagaggctagggatattgttaaatgtcctacagtgcacatgacagacccacataacagagaattgtatagcccaaaatgtcattagtgtgacgttgagaaaatatatatgcagcatatgttttgtaaaaaagaagcccttaccagtctctgtgacaaactctctactctgtgtagagcactgtttttccagctgagtctagatgggaagccccgcttgtcatttgggctgtgggtgtactggtgctgggttggcaggcctttgcttaagtaccatcctggtacctcaaggtccactttcaaccccagtcccaattccctctgagcttgaggtgtttccaggcccaaactggtagaactagtacttagttttcagctggaggctctttggctctgtttgatctcttggacatcgagtctggtctgttttgtcttccagaaatctctcaaagattctgatctacatatgccaccgtttgctgcctttcagatatgctgttgattcattagtatttttatatttcttctaccatgtcagtgtgctttgggggaagatgaagtaaattcatggatttagcccagtgtcttaagccaaaggtgcctaattactttcttcttcttctttttttttttttttttgaggcagagtctcgctccgtcacccaggctggagtgcagtggcacgatcttggctcactgaaacctccgcctcctgggtacaagcgattctcctgcctcagcctcctgagtagctgggaccagaggggtgtgccaccacacccgctaattttgtatttttagcagagacggggtttcaccatattggccaggctggtcttgaactcctgaccttgtgatccacccgcctcggcctcccaaagtgctgggatgtgcctaattactttcttataatacctgatatactgccccctgttgttggaatttaacaaagacatttagtgataaattactatttttttttgttctttggctcaacgtaatccattgtttgttttgtgcctgttatgtgtgagaccctgtgctaggttttaggtgtacagtgagaatgaagcagacatgtaatccttgctcttgtggaatttatgctataaaggagggatattcattaatcaacaaagtcaaatatgtaattataaagtgtgagaggtattatcaaggaaaataataaggtccttgccttacaaaaatagtataggaaataacagcaattttttttttttttttgagacagagtctcgctctattgcccaggctgaagtgcagtggcgcaatctcggctcactacaacctctgccccccaggttcaagcgattctcctgcctcagcctcctaagtagctgagattacaggcatgtgccaccacacctggctaattttttttgtatttttagtagagatggggtttcaccatgttggccaagctggtctcgaattcttgacctcatgatctgcccacctcggcttcccaaagtgctgggattgcaggcgtgagccactgtgcctggccgtaacagctaaaatgaagtacacactgtgtgctagttactgtgccaacaactttacatgaaagatctcatttaatacgcagaataacttatttcagaaatgaggaaactgagacttatgatcctaatttagtattaggaagtcagagaagacctgtgtgggaaaagtgacacacagagaaccagacaagtaggagataaccaggcaaagaacagagagaggctgtgtaaagcagaaggaataacatgctcaaaggcctgaggatgaatgaatgaaagcatggaaggacaccagtggctgaaattgagtgagcaaggaaagagtgcaagagatagggcaggtaggggctaaatcgagggggttgttagagtccaggataaggagattagatttcattctgaggcatgagaaactgttggagggttttacctaagagtgggacacaacctgagttgctttcctagagatcactctgctttgtggagaatggattggcaggggcagaggcttactgtgatccaggtgagagaggatggaggttgggactacactggtggcaataaaaaaaatgcaaaaaaaaaaaaaaaaaaaggcagacagatttgaagttttagatatatctccaaaatatattatttgcagctgtgctagatatagaagataagtgtgaggaagaaatcaagggggtttccacatttcttacttgagcaacagggtgggttggagtactagctactgaatggtgagggaaaggttttaaacacagaaagcttgtgttgcctatgaaatttaaagtggaggtggcaaataggcagttgagaatctggaactcagaaaagaggtctgatcaagcaaagcaactgtgggaattgctagcatggcatttatatttacagtcatctctctgatcagattaactagatatagagaagagtgccaaggacagagccctgaggaattcccacatttagagatctggtgttggaagaggaacagatagtgagggaaactgagatgggcagacgagatagaaggaaaatcagaggagtgtttcgttgtggaaagctaagagaggaaagtgcttcagagaggaaggagtgatcagccagtctgaacactcattttaaggtgagagccacataccacagtatgtttgaaacttaccattaacaaagaagcgtcatgtaatgtcttccatctctaaaaacaaaaccaaaaaaaacccatctgtccacctcactcacatctccctccatctgtcattcctttcctctgcatcccttaatgttaaaagtccccacgaaaggacccagtgtctcactgtcctttttctatctttatttcactccatttaggctttctcacccatattcaactgaaaatactcttggaaaggtcaccagtagccaccgtcttgtcaaatctggtttcacttctctgtctcatccttcttaagtctgtaggcagtatttgattgaattgattgctccctccttgaaaaactctgctcttggcttctatgacactacattcttagattaacctctcacctcatggctactgcttatgggtcagtttagcttttaacagaatgtaaatccagttatatatctcctctgttcaaagcccttcgatgacatagtgtttctcatcacactcagaattaaatccacaatcattacaatggactcccaagtcctaagtctgctggcttttgcccacctctctggcatcttatattgaactggcctttgtgctgtttcttgaacctgccaagctcctgagagctaccatgcttgctgttcccagtgtctagaaagctcttcacccagatctttgcgtggttcacttcacgttatttagagctctgcttgtatattacttcctcagagagaccttcccagaccactgtatcactgctccccaacctgtcactttctctctccccaccctgctttttattcctcatagcacttgtccctgtctaaaattaagtattgacttgtttataaacagtgtcttccttcctccccacagaatggaagctttctatcacttgtctccttgaacacttctctgttcctagtgtctcaaacaatggcatgcaattgctggcccacagatatttgaatgaatgctgctaaaaggttgaatcagatgaggatgggaatgttcctgttggatttggcaatatgccatttgttggtgttctggctgagcagtttaaacagagcactgagggtgggagtcagggcaaatagattaaggagaacctgaaggtaaggaattagacaagacgaattagacaactgtgtttcggaaagtcagctgagaagagagacgcgaggctggtggtagctgggggagggtaaatgaggtcaagaagacaagtctttgagttgacagcagtggatgtaatccagagcacacatgacaggatggaagagacttgtcttcccttttagcaggtaggaaaatggtgaagatagttaccaagccactctgatggtgtagttcatggagtcgggtggagggtgagagtggaggcggatgagtcagtgcctggccagctgcatgagaaaacaaggctaggtattgggtgaaagggagccaggccctgtggaatgaggtgggattgccatgtcttcaaaccagatgttgccatggttggggtcctggcaaaaggtgactaagggagcagggtgtggaaagaggaaaaaagaagcaaccagcagttttgttacatggtggctgaggatctaataatgtctccttgttttattttatttttatttagctggtctcaaattcctggcctcaagcaatccttctacctcagcctcccaaagtgctgggataggcatgagccgccacacccagctgtctccttgtttgtttgtttgtttgtttgtttgtttgtttgtttgttttgagacagggtcttgctctgttgcccagggtggagtgtagtgtacaggcccggctcactgtaatctccatctcctaagctccagtgatcctcctacctcagcctcctgagtagctgggactataggcgcacatcaccacaccggctatttttttaatttttagtagagatggagttttaccctgttgccaggctggtctcgaataccttggctcaagcaatccacccgctttgtcctcctaaaatgctaggattacaggcatgagccattgtgccctacttgtctccttgttttaattaggaacagtattctctgtgcccggaaaccatttgggtttatgataggaaaactgtctttttcccttcctctcccatcttcctctagatggaacccattgaggctgagagagtgtacagtgttggccctgcatacctaacttgccatcagaattgaatgtgttcatgcctccagatattccagtgctttttatgtgctaagtactgttttaggctcaaaggatatagcagtgagtaaaacaaagtgtctgcctttaaacagcttttattctaatgcagggagacagagtaaataaatgtatgatagtcagagatggggtgagcatgtcatcctgggccccatgctctctccccacctcacctcaatagccctggcatggcagtgggaggtgcacactcatactttcttctctgtttccatttcctggcatctgcagaaggactgaatgagctcttcctcttcagggtgttgccctgaatggctgacttaagccctccattgcacaacacagtaatgacttgttctgttgtcttgatttcagatgagacaccaattattgcggtgatggtggccctgtcctctctgctagtgatcgtgtttattatcatagttttgtacatgttaaggtgagcctactaacacttcacattctcttagattctgtttcaatatcccagtgtcccaatgaacccacacagtccagtagacagtaggatatacacaatgaataggatagagggggaatgacccatgatagtgctaaaattgaagttctacttagaaattatttaaaagctctacatagtcttccttaagtcctaagccctccctctttcttccatctgtccaagcccagtctcccaactccagtgcaagctaaagcccagaatggtagtttggaggttgaggtaagaaaccgcagtttgttattagtgacaggtgttacaggatctctaggtctagccctgctgaagcaacccctaaaagggccccagtaagattacatgctcaacaaaagcctactgtatttctggctggggctttgtccccagacccttctgggacccctggccctggcatgttgagttgagccatgtgagttgtgagttacaggatccctctttctaaccttctttcagggtcctctagacgttaccactcaagcagaagcaaggaaggggaacccaagggagagaagagggtggtgcatttattctcttcctgctaaagctactgccctgactaattggatttagccctgccttatctttggcctaaccaaagatgttctgtgctccctctgttcttctgcagggataaagagagaggaatcatgtgccccctataatttgtcatgtgtctctatcattctgcaggagacttgtggccaggactgtgtccacccaatccaaagctctgggcttctccctgggtctcccaggctacactgaggaaataccaagatttttgtttgatatatattgtctgtctcccccagctgtattccacccactcaccctctctctacctggtgtggctgtgctctgcagtgagccacatgagcctgaatatactgttggggttccctggttggattccagtgtgccaagggtaaacaggagtatcccgaggtactcggtcaccccagcatgctgctgcctcagggtgtgcatgacctgtctctaaaaaagcccgattatttttaaaggcgatttagaaaggctgaattgatgagcaggaatacagaggtgtgatttgcctctcccacctctgtgctccattcttcactgtgatcattttctcattaggtttaagaaatacaagcaagctgggagccattccaattctttccgcttatccaacggccgcactgaggatgtgggtaaggcattccttaatgtcatggggaaccttcacaaggaaggaaatcaagaaattaggagtttctccatccttttaaaagaataagacaataaaaagaggaaaaaagatttttgaagaaaacagtcctagttcttacaggcttggtccatgaggtagaaccccgtttagcctccagaagaggggctaggttctcagggtacctgactgaccttctcccttgtgtactgcagagccccagagtgtgccacttctggccagatccccaagcaccaacaggaaatacccacccctgcccgtggacaagctggaagaggaaattaaccggagaatggcagacgacaataagctcttcagggaggaattcaacgtgagtactttgttgaggctggtgtatcagcagggaagaaggcagacctaaagtcagacctttcagatctttggagtcatgaagtaaaaaatgggcttttaatgtttaagaggtgagaaatgttttaccaagtttatctgactccctgtatgatcatggataggaaatgaagtgagatttgcctcacctccctaatctacccatccattcagtcatcatcacatctcttacttcttttgtttaataaatacttagcaagcatctaatatttgtcaggtaatattctagttgccagtgatatgatgaggagcagaaacagatccaatccctattctcaaggaactcactgtccaggagggaaacctcacaaacaagaacaaatataactgtgtaagttcaaacagcagtacagcacatgaaggactggtgcatatttgtaggcatccatattaagaggttgcctttttgagtctagagcaggggtgtcagtgtttaaagtagacagtgggatagatcagtgtgggaaatgacgaccatgggagactgcagagcacaggtctcatcttgagtatttagattcacattttttataattcccacaaggaagcagaatatgtttttaatccaccagttggtgatcctagcctaccagttctgatcccagatcagaagagcttctggccagcacggtgactcacgcctgtaatcccaacactttgggaggctgaggcgggcacatcacgaggtcaagagatagagaccatcctggctgacttggtgaaaccctgtctctactaaaaatacaaaaattagctgggcgtggtggcatgtgcctgtagtcccagctactcaggaggctgaggcaggagaatcgcttgaacccaggaggcggaggttgcagtgagccaaggtcacgccactgcactctgacctggcgacagagcgagactccatctcaaaaaaacaagagcttcctcgaataaatgatattttaattgatacctaatcataggcaagggtggtggggacaggggattggggagccttccagccactggaaatagcaggagaattgtcaggagtgagtgtgctgaaggagggcacacccagaacatgacagggctgtgtgcagctgaagaccagagcttcaaaggaggataagaggtgaaactagtgtggccagaccacagaccttgcagatagtcatgagagaagtggcaagccatagagcagccagatttacatcttgaaaaaatgactcagctgggcacggtggctcacgcctgtaatcccagcactttgggaggccaaggcgggcggatcacaaggtcaggagatcgagaccatcctggctaacacagtgaaaccctgtctctactaaaaatacaaaaaattagctgggcatggtggtgggcacctatagttgcagctactctggaggctgaggcaggagaatggtcagaacccgggaggcggagcttgcagtgagccgagatcatgctactgcactgcagcctgggcaacagagggagaccccatctcaaaaaaaagaaaaaatgactctggcttctgtaaggagaatagcccatgggcagaccagaatagttgcgggaatacagttaggggttacaggtgttaatatcagaagtgctagtagattgacctaatgtcatgactaggaaatgggggatggatttaaggacacagaggagcagttccagagttggtaaatacatcagctggggcattgctaaaccatcagtttccttcacaactttccactaagccatgtgtcagctttgccttataggctggctccttttttatcagtgggaaaaattttcccaaaagcttctggagacttctcttgtcacatgctccttcttaaaccggtcgtgagcaagggagaaaataaggttactgtggttggctgagactagtccagattactcctgggtcaaggccaggcatgctagctcacacctataatcccaacactttgagaggctgaggcaggcagattgccttgatcacaggagttcgaaaccagcctgagcaacatggtgaaaccccatctctacaacaacaacaacaacaaaatacaaaaattagctgagcatagtggtacatgcctgcagtctcagctacttgggagatgaggtgggagtatcgcttgagcctgcggggtggaggttgcagtgagtcagattcactccactgcaccccagcctggacaacagagccagatcctgtctcaagaaaaaattttttttagatattcatgtgggatatggatggataacctcacagaataggaggtctggtaaaggaggaatggttattgggtcagtgggtcaccattcatatctgctccatgacagaagggcttagggggagtggtgagtgatgtcagatttgcattttgagaaaataactaactacaatatagagaatagataaaagggagaggcaagagttgaagtgggagaccatttaccaggcaagagttaacagaatagcttggaccctttttgggggctattggaaaaatagcaccatttaatgttcattattgattgataagatttaccacatcctgccaggcacagtggctcacacctgtaatcccagcactttgggaggccaagccaggcagatcacctgaagccaggagttcaagactagcctggctaacatggggcaatcccatcccatctctactaaaaatacaaaaattagccaggcgtggtggcacgtgcctgtaatcccagctacttggaagtctgaggctgaggcaggagaattgcttgaacctgggaggcggaggttgcagtgagccaaggtcgtgccattgcactccagcctgggcgacaagagtgaaactccatctcaaaaaaaaaaaaaaaaaatttaccacatctcacaagacagcactccagcctcagtaccatagctggatctgtgctaggcattgtactgttttgtaatctataatgccaactgcttctgggtgatggggtatgtgatcccattactatactttttttctgacaaattagttcttttctttttccataacattaaatttacataagcatgaaacgaattatttgtttggaggtaatattccctgagactccatggtaaggtatttcagtaaatccctggatggtgatggtattcctggaggcatgacaggtaaattcggatagatattgtggtgagagccatttgctgtgctaccatggcaaccgtgttcacgagctcattgggccagcactagggtagtgagggaaagggctgaccatcatcacctgggtttctagcaatgagtgccatcttgtgagcattcacatggaacataaatattttctttcttgtgctagttatccactacccagcgattggtttagatcctgacttccagtgagataagtggtgtgataatttgcttgaagttctcttcactaggagaatttctcttttatacacattcaaagccatcacttaagtagtataccccatagcagtctacttccagcccagcatgggccagcatgtttcaccaagcagtttatataccaggccggactttttcttcttcagttaactgttgatgtcaataggaagtcagaagtatctattgcggcagtgggttgtgtggtaggcattttatagagatcacttccagctgataatgggattctgctgggcatgtccaaatctatggctaattgaatctcataatacctagtttacgagaccggcccggtggctcatgcctgtaatccctgcactttgagaggctgagttggacagatcacctgaggtcagaagttcaagaccagcctggccaacatggtgaaaccccgtctctactaaaaatacaaaaattagccaggcatggtggcaaatgcctgtaatcccagctactcgggaggttgaggcaggagaatcgcttgaacccgggaggcagaggttgcattgagccgagaccacgccattgcactgtagcctgggcgacaagagcgaaactccatctcaaaaaaacaaaacaaacaaaaaaacccctagtttacgatggggagttgaagtcatttggatacctgtctgtgatcaggcttgcagtctctaccctagagcccagtactaggctaggagcatggtcttaccaataggatcatggtcttatatccatatccaaatattacgattcttctgtttaccttactacaaacactctagagctccatacaatctaccagagcttatttctctgtggcctggatcagcaggagcactttctcttttcagatcactcaataaattggtcagaggctgggcacagtggctcatgcctttaatcctcgcactttgggagatgaggcaggcagattgctttgagtccaggagctcaagaccagcctgggcaacatggcgaaagcctgcctcttcaaaaaattagctgggcatggtggtatgcacccgtagttccagctactggggaggctgaggtggggtattgcttgagcctaggagtttgaggctgcagtgagctgtgattgcaccactgcactgcagcctgtgtgacagagcaagatcttgtctctatgtaggtaggtaggtagattgattgattgatcagatggattagatggattaaattgagagatcagagttggatgcaaggataaggtatctgctgtctccaaaactcaaaatggcccagcaagcattgctcctctttgttagcaggagaggggtggtggggcaaggggcaacaagttgtcttttatgttggaggagataccctgacgtgctgcaggcctttgactttcagaaaatttggctgaggtggcaggccactgtatttttatgtctgacatgtacatctaagatacataacttcctgcttttcatgtctcacattgatgtcattagcatagttgtcaaggtaatgtcctgtgaaacagacaaaatcttgatgaaccagatcacaacacagaaaggtcaagatgatttatcactgaggctgctcttgccatgagcaagaaaaactgcttcaagtagtccacacaacttaaaaagaacacacacttacccctagcagtagtctaggtaccaggagttatatgttaatctgcagaaagtagagtacgtctggaaaagtaactgcaaatctgcaaagtcttctgtagcacttaagatcctgcggttcacatggagacttcgccttttgctaaagagatcactgctctaggagcttacatttgctctttctgtgatggttcttatccagtgggctagggaatctgtgtgtctttgggcattacctaatggccaatgttattgaaaatcaaggtggcacagagggaggtctagccaacttcacagagccgggagcatctagtttctttccctcccttttggaggccctgacagacaggcaggcaggcagacagacagatcgacagacaggtaagatagattagatagattaataggtcctaatgtgaagccacctcaggccaaaattccttccatcagctggcctgcaaaggctccgttctaactagcatatcttagcgacattctgagttcctagcaagtagctacctcaaggccaggacctagcagaccccaaaagatgcatttccctttacctagtacagttgccatggcaaatatctgcagattattaagaaaagatgaggagggaggtttataatatatgtgtgttaatgcgctgtggcagggttcctccttacagatgcctggcctccctgttattgaagggttctgggtctgaaatgacccaggcctacgagttggatgagggggccccctctctagcatggtggtctagtaggctgcctaaactgacctggaaagctactttccgtttccattactgggagcttcacaatgaattattcacagccataaacgtctgatcatggtctccaacagtctttctagcccacttagatcaggaatcccattttgaaatagtcccttccactagcatctcacgctgctgaggacagccaggaaagcacttctgaaagattccagtgctttcctcaccagtgtatagcctcagcaaggcatgtgatgtggatcccatcaagggcatactgaaggtgtcagtagaaggctgagcctttagagtccatatgccactctggtctcctctactttgtgcccaggtttttctggcttttcattatcacctcactaaatccagcattcagtccaggtttccactggcgagcctagctcaacattaaaaccatggccagttacctgagctgttacactacctgcagaagttcttttgaccataccataattagaaatttggctttatccaggctgggcacaatggctcatgcctgtaatcccagaactttgggaggctgaggcaggcagatcacttgaggtcaggagtttgagaccagcctgaccaacatgctgaaaccctgtctctactaaaaatacaaaaattagccgggcatggtggtgagtgcctgtaatcccagctactcgggaggctgaggcaggagaatcgcttgaacccgggaggcagaggttgcagtgagccaagattgcaccactgctctccagcctgggggacagaacaagactccatctcaaaaaagaaaagaaatttggctttaaccaagtcatactctcccttccttgttataacgtctccaaaatctatatcaacaattgttcctatcatttgtaatgatccagctcagtgaattcctgtagtttcttctggatatttattagctctttactttttttcccccgctgtagagacggggtcttgttgtgttgcccaggctggtcttgaactcctgatctcaagcagtcctcccaccttggtctcccagagtgctgggattacaggcatgagctactgtgcctggccagcattttacttttctaccttatttatgcattttaccctcaggtcatgttatgcttgcattctggtaatgtgtgggcaatgcaggctgggttgtggggcagttttcatcatgacagcaagatgcagtagagagcataatagagatttttggaaattaactttctttgggtcctctcttttatcatcatttctgttgtctcacttaaagccttatctttctcatgagcaacccaggaaagatgtgaattctgtggcattaaaattcagcaactcgcaaaatttggaaaccttaacatttcacttagcaaaatacatatatagtaatgtaaaggccctgagtcttgggttttcatttcaaggtgagcatttgatattggagctgggttatttcttgttttgttctctaatattgtcagaagtaatcctactccttggtttcaacatttcccctctccttttaattgggacacccctactcgtttaccaccagcttgaacacatcacaggtaattgcaagcaataactaaaatagtagttgtgcagctatgaactgtgagcagcttgctctttcccatcctggcaattggttgtcagtttctttccttccatctgaacccagtaacatcacccacgtttcccctagcagtctctcaactacaacccactctgatagtaattgctaaatcagttaaggtcctctagttaaaagcaagagaagtcacctcaactaaattaagcaaaaacaaacagaactattgatttgggaagacactggaggagctggcagaatcagaaggtaagttggagtaccaagtctcaggtagagccgaccttggtggctttggggcccttctagggaagcccctgcttcttcctagttttcaaaatcctgggagagaatctgattggctcagtatcagtcaggtatgactgtgtttggatcagtcagccctgggagagaagaggagaaataacacatagggcaaacaaaccaatttgtgtctactgtcatagaataatatttttagtaaccatcagatggggaaggcctttctaagctacttagaagatttagatgccagaatggaaaagtttgaaagatagcaaatatattaaaatgtgaaacatctttgtgacaaatgatgtcgtaaaaaagtggccaactgggagaatctatttgccataggtagacaaagaatgttccagaatatacaaacctgtgagtaaaaggtaaacaatccagtcaagaaactggcaatttacagaagaaatacagatggtctataaagatatgaaaagaagatcaactatatctagtaatcagggaaatacagattaaagctaaccattattttggacctatcagatttgaaaatttaaaaagctttatatcaaatgtggacaaaagtatggggctgcagagacttacaggtgggggagtttaaattggtattgcattggagggatgattctggcagtaccaatcattatttaaatgtttgagttttctgaccaagcttctgagattcttaacagaaaaagccatgtacaaagatgtttatgacagcattatttataatagcaaagaagataaaaacgcaaatatctgtcaaatagaatggccagatgatttcttatatccattatgatattctatactatcattaaaataaatgtgttcacatagatctctaagttatattgttatgtgagaaaacatatgtgggataatttcatttttgttttcaaaaatatgtatatctgtgtgtgtttgggtatgttaatgcttttttttttaagtctgaaagactacaaattgtcaacagtggctgcctacaagggggctggaagagaggagagacataatagggaactttgttttctactaaattatttgacttaaaacaagcatattctttttataatatttttaaagcagatttttttgaatatgggaaataaatctaatggacttagtttgcttcgatggatatataacatctagaataaagaagttcctatgcctagtttgaactgtgtcaggagtcttgtggtcaggtctctataaaaagggatatcaccaaatgggatgttgttctggagagaaactggaccatgggggtgaataactaaaggaacaacactcataggacatgacagctgttttcagatatgtgacaggctaaaaggagactgtagcatttccgtgaatgcccacctgattagaagttctaggctgtggctttcatcctaattacaagctggagcttttttgttcaccagcatttgtctttctaggaatcattgaatttattcaaaagaaatactttgaaaaaccactcagaagcccccattttcagggaaaattgaggtctttaaggcattatcaaggtttaaaaagaaacaaaaagataaaattgtgttagcttctggctgggtgcagttgttcatgcctgtaatctagcactttgggaagccaatgcgggaagattgaggccaggagtttaagaccagcctaggcaatgtagcaagaccttatctctacaaaacaattttttttaattagccaggcgtgatggcacatgcctgtagttctagctactcagggggctgaggtgggagaatcatttgagcccaacacttggaggctacagtgtgagctatagtgctaactttatagagctgcaggagctacagtgagctacagtgatcaccgcactgccctccagcctcctggctaccagagtgagactctgtctcaaaaaaaaaaaaaaaaaaaggcttagctcctgagaggaatgggataggagagaaagaaaagagggaaagaggtgaagccagtgaaatagtcagaatctgtgcgatgtgagatgtgaccttcctcaggacctcacatctcttagattgccaggtgaagaaggcatgtgtgtgtcactagtgatgggactgagtgtggcatctgagttgagatgggtgaaatcgcctctacattgatgagttgtcccaaaataagtgaatcagagtcacagtcctgtgggaattagcaggaactgtgacaagggctttggaattccactgtccagagagttgggagtttgcgttttgcaaggggcagaaaagatgcccgctgacatctgggttttacattgcttagtacgagggaaatgcaaaagaaattgtgtgtctgggtgttgggtcgttttaaacagaactgttccaagacctaccttggaaggtagtaaatttcccatcactctagtgttcagtcactggtgactattgggtgagagtattgaaaggagattcagacttaaaagtgaatgagattcagacctgtactggagatctaggcaagaaaagaaaggtataaggattgcaaaggaagggacaaaatataaatttttcacagaccaaatactgtcttcagaaaaacccacagattcatcagacatattatagaattaatatgacatattatattatagaattaataaatatgacatatttataatttattatatatgacatatttataattaataaatatgacattatagaattaatatgacatattatagaattaatattcatcagacatattatggaattagcaaggttgctagatacagaagcagcataaaaatttaatgcatttctatacataggccacaaacagaaaacctaataataccttttaaaaggtgccaattacaatagcatccaaatgtaaagtacctaggaatggatttaacaatttagagaaaattattaaaatgtttgaagacattaaaggaaaatagcttaaattagtgaagagataggatcaatggattaggaggctcaattttgtaaagatgtcaattctcccccaagatatatagattcaatgcaattccaataaaaatcccaacaggtttttttgtggaacttgacaagctgattctaaaatttatatggaggagaaaagattcaagaatagccaagacattcctgaagaagaagaacaaggtgaggagacctgccttaccagatataaagagattataaaattttagtaattaagacagttttgtattggcactgggatagacagatcgaccagtggaatgaaataaagagcccagaagcagatccatttgtaagtggaaacctatttatgacagaaatgctcttgcagtttgggtggggaaaagatggtcttcacaataaatagtgcctgggaccattggtaaccctgtgggaataaatgaaattgaatgcttgtcacatatcaaacacaaaaaccaattccagttgctgtaaacactgaaatttaaaggacaaaaatgataaaatgtagagatcataatgtagtaaaatatacttctgatctcacagtaggaaaggatttcttaagacttaaaatgttgataaaagggaagattgatgaatttacatgaaaatgcaaaacctctgttcataaatgataccataaagaagatgaaagggaaggccacaaccttggtaaaagataacacaggtaactgataaaggaagagtatccagaatatataaagaacttctacaaattgttaagaaaataagtaggctgggcgcagtggttcatgcctgtaatcccagcactttgggaggctgaggtaggcggatcacaaggtcaggagttcgagaccagcctggccaacacggtgagaccctgtctctacaaaaaaatacaaaaaaaattagccaggtgtggtggcgggcgcctgtaatcccagctacaggggaggctgaggaaggagaattgcttgaacacaggaggtggaggctgcagtgagccaagattgcgccactgcactccagtctgggtgacagaacaagactccattttgaaaaaaataatccagtaggacaacggggaaaccacttgactaggtacttcacggaagaggaaactcttttgaccagtatgctatggaaagatgatgaacctcattaataatcagagaaatgtaaatcagttaacacaaagtctgacagtagcaaatgttgataagcatacggaactggaacactacattgctggtgggagtataaattagtacaacttctttgaaaaacaatttggccttatctggtaaggttaaagatacctatacctgaaattcttgcacatatgcacaagaaagatacaaaaatgtgtctcaaagcaggacctttaactgtaaacaacccaaatattcatcagtagtagaatggataagtaaattttaacaccgtctcaaatggagcactacaaagtagctgaagttagcagccaggatgaatcttaggaacgtaatgttgagccaaagaaaaaagcaactcaccacttaatcatgattccattttcctcaaaaactagactagcaataataatacattgttttggatgtaaaaaatatgagatacaaataaaggaatgtaatgataattataaaacttcaggtttaccagtgagaggggaaggaagaggatataaggagaggagcccaaagagagcttctaagttaaattatgtgatggatactttttaaaaaataaatatcaacaaatgtgaaaaaaaaatttttttttaaccgacatgtctttaaaaaatgaatgagtacttagccttggttccagttaaggcttaaacaagagatgaaacggtcttcgatgccacctagtgtttctagagagtttaacattttatagacttctgctctagctgctccttcctagctctgtgagctaggtttttcagagtagaaaccaaaaggagtaggattcaccttgttttcatccgtgacgcaggctcttcattctgaacctttgcatctagcgctgtgttctccagggcaagccctttcttctctcttgttaaacaatggctcctgtttcttcctgactctttttaggagccttagtccacctggagacctagtttttctttatcatgactgagggagctagggatgctgatagggctgtgagatgtagtctttgttattcctgacatttttgtattgaagactgttttcaagagtcttgctgtccctacgtctgttctacattttagagaagggatgcacaggaaaactagtgcctctggattagccatcagggcttaaaaaactgacatctcatcctgccctgtacttgggtggaaacctgtggaaatcttatgtgaaggaagagaatgcaaactgtgggtgaactgagaaattctgatctaaaataatggtctctactgcgtgtgtaagagtccagcccaggaaaatcttttcttccttttgtggtattcacagcatagggtcaggggtaattgcctctgttagtaaaataacatgcagaacctccagggttttaatctgaaaggaaatctcttgagtaggtgagggcagatggattttgaggtcctaatttccctatctttgggtctttcactttaatttctcctatcactgtcatgctggtttccagtaaatatatttgctcctttcttaaagctcttgcttcccagcctgggcaacatagcaagatccacctctacaaaaataaaaattaaaaaattagccaggcatggtggtgctgtgcctgtagtcccagttactcaggaggctgaggcagtaggatacctccagcccaggagttcaaggctgcaatgagctatgatggcgccactgcactccagcctgggtgacagagcgagaccctgtctccaaaaaaaaacaacaaaaaactcttgcttccatctgacaaaaaattggttccctttgggttggcatttcctttattcagtctttttttaaattattatcaaagacagaaacgttcattcttcatttctgcctcttgctcttcccagtccacttttgccttcattccatctccaaatgtagtaatttttttttttttttttttttgagacagagttttgctctttctgcccaggctggagtgcaatggcgcagtcttggctcactgcaacctccatctcccgggttcaagcagttctcctacctcagcctcccaagtagctggggttacaggcatgtgccaccatacctggctaattttttgtatttttagtagagatggggtttcaccatgttggtcagctggtctcgaacaccagacctcaaatgatccacccgcctcggcctcccaaagtgctgggattacaggcgtgagccaccgcgcctggcccaaatgtagtaattctaattccagaatatgtctcaaatgcatccatttccttgtatcatcatttttccatgcttctcttcttgctcctctctagtccattttccatacaataacaagtaattctttaacatggaaaatggatcacactttaaaaaccttcaatgatttccttatgcacttaacataaaatttgaactccctattcaaggacctacctggaaatggatgatctgactttgccaggctcatctcttcctacttcctcctgccatccccatcaacctcaccttctgcgtgatacctgcactgattttcggttcctcacacaaccaagccttcttccacctctgggttaccacagatgctgttctctgtgtctggaatactattttctatactcatccttcctcagagagacccacctgtaatccaaatttggtgctttctgatacttcatctctagtagcattctgttctttgattgcattcatcatggtatataattatatatgtatttgttttatttgtttaatgtctgcttttcacccacaagtttatattgtccttgagggcgagaactgcacttatatttgattccccactctttgctctgtatctagcccagtgcctggtaggtacaaaatatatatttgttgaaagaatgaatgaaaagtaatgcatgaattgttcctctactgctgaatactacggttgttctcagttttgggtcattctaaataatgatgaagtaaataattaggacataaagatttttatttcctaagggtatgttctcaaaattgaagttgctaggccaaaaagtatttttgaaaagtttttttaaggctcataaaatgtaatttccaagtcacttactcggaattagtgttggaattttaaagtgcctccctttttgctttcttgtttgtttttatagtgtcagagtctcactgtgtcactcaggctggagtgcagtggtataatcatggccttgaactcctgggctgaagtgttcctcccacctcagccttctgagtagctgggactacaggcatgcaccaccatacctggctatttttttttttttttttttttttaatgtagagacgaggtcttgctgtgttgcccaggctggtctcaaacttctggcctcaagtagtcctcccacctctacctcccaaagtgctgggattacaggcatgagccaccacacccagctccttttttcatccttaattttgaatatatgaaacatacaagaggagaacagatcaaataataaaatttagcttcccactctgataaaactcatttatttgaatacttattctttgctacacatgagattatttccttatgtggcagatgttgttgttccaattttatgtatttatttattatttatttttgagacggagtctcgctctgtcgcctaggctggagtacaatggcgtgatcttggctcactgcaacctccacctcccaggttcaagcgattctcctgcctcagcctcctgagtagctggggttacaggtgtgcaccaccatacccagctaattgttgtctttttagtagagacagggtttcgccttgttagccaggctggtctcgaactcctgacctcaggtgatccacccgcctcagcctcccaaagtgctgggattacaggcgtgagccacttcacccggccccaattttacagatgaggaaactggacctagaaattttaacagatgtgctcaagttcatacaaacacagactatctcatgtcagatcattgtgtgataacctccctgcactaactaatctacatttgctccagaactgctgcaaatttaatgtcacctcacccaaatcttctgcttcttaactgctgcatctatatgaatgccctcccacccacccaccagtccttgcttccttgccacatgatgctagaggctggggtgccatgcccccttagatccctaggaagagattaaatcagctggccatccagaaccttcctgtgtggttcactctgagatgcatgtcatctttgtgtggtggtaattagcatgaggataaatggcccattccttcaggtatgtccccattccaatttacaagggtaggcccttttggcccagtatcataacaacaggctgctaaccacatagtaatcatggaaagagcatgctatacttacataacagaaagggcattctgccccctgaggattcttgtgttgttgaactctaaggagcttgtggctgtttcgggggagaggagcattctctgtgttaggctgcaggtattcacctgggcccatgtttttccccccaggaaaaggtagaacatgctaccaggtcagggtttggtgcagcagtttgcatgtttgatgtttatccctgctaataattcctctaatttctcttaacctttcaggctctccctgcatgtcctatccaggccacctgtgaggctgcttccaaggaggaaaacaaggaaaaaaatcgatatgtaaacatcttgccttgtgagtgtctttagtgtttcttgggatgtaacctgaaattacatctctggagggattttctgaagatggaaagaatcttgcaattgggcacagcagggtgaataacaagagtgcgttcatggcagtactcagtggctcatacctgtaatcccagaactttggaaggccaaggtgggagaatctcttgagcccaggagtttgaaactagcctgggcaatatagtgagacctcatctctacaaaaaccttaaaaaattagccaggcatggtggtgtgtgtctgtcgtcccagctactcaggaggctgaggtaggaggatcccttgagcccaggggggcagaggttgcagtgacccaagatcgtgtcactgcattctagcctgggtgacagggcaagaccgtgtctcaaaaaaataaagtaaaagaaatgaaataaataataataaataagataaataaataagagtaggttgaagactttgggctgaaagagcctttatggatcccacatactcagagtcaattaggatgatccaggaggatttttgtgtcaggcctaaagtttctaggaggtcctggagaacagcttcactaggatcaggcaggaagcagggggtaatggtggtggtagagatggttttttgtggtattcattgaaagaaattctaatgcagagttctctgtataaacccttcccagagttagccattgctaatcagttgatccataagctaacagacatttttctagtccattggtatccagaatgggatatgcataatttaatgagatatgagaggaagatgtttgaacctcacttgatttttatatttgcttttcaaaaaaaaaaaattcctaatcctcagaacctgtgaaaatgttttttttttaattttttgtagagatggtcttgctgtgttgccttggctgatctcaaactcctggcctcaaacagtcctcctgctttggtctcccaagtgttgggattacaagcatgagccagtgagcccagccagtatatttgccttttaaaaattcatccttttaaattttttatttcatttatttttttagagacagggccacccaagctggggtgcaatgatgtgatcatagatatgtatcctcgaattcctgggctcaagtaatcctcctgccacagcctgctgagtaactagaactacaggtgcatctaccatgcctggctgattattttttagacacagggtcttgctgtgttacccagcctggtctcaaactcttggcctcaagcagtcctcccactttgacctcccaaagaattgggattacgtgcatgagccaccacatctagaccctaaaaattttatatttcagggtatatcatacattagcatatgtgcataatttatcaataaatgagcatgtattagagatgcctgctcacatttttataagtgaagtatggaaccaaaaaattaggaccactacactatgcatttacagatacttttgtctttttcttttttctttctcgctctgtcacccaggctggagtgcagtggcacgatcttggctcactgcaggctctacctcctgggttcaagccattttcctgcttcagcctcccaagtagctgggactacctataggcacatgccaccacacccagctaattttgtatttttagtagagacggagtttcaccatgttggccaggctggtctggaactcctgacctcaagtgatgcaccgcctctgcctcctgaagtgctaggattataggcgtgacccaccatgctcggccttgtcttcttatttatgtgcacatgttggaggagggggatgtgtgtatgtgtgtgggtgtgggtatgtgtatatataatacatattttttaatatgattggtatactgtacacatttctctcttttaatagtatatattgtcagttcatctgtcaagaaactttcttttttctcaactacttagtattccacattgtagatgcatcttaatttatttaactagtcccctaatgatacttaaggtattcccaattttttgctgttatactgttggagttatattgttggagtggcatctttatacaagcgtgagtctgtgcacataggcacagatgtctcaactgtcctggttgcgtcaggttctgtgagaaataaattttgattttactgaaatattgttggtttgtttcctagatgaccactctagagtccacctgacaccggttgaaggggttccagattctgattacatcaatgcttcattcatcaacgtaaggatcgggtgctttccctgtcacttccctgcctgaccattgccactatctgttggctcctccccagctgtgtgttaggagaaatatttgtcatttcatgttttccctgacaagtctggtttttttaagtgactgaatttttttttaaggtcagtcaaatagttttaatcattttctatatttaccctgtcgtcattccctatggtttcccatgtagaaatctgtgtctaaatatgtattttgtgataagagtcagtgaatcctttattgagctgattctaattacaaacaaaagcaggccttgccctcaacagtaaaaataagggagaacaggacaagaatacctgacatgacaccagctatattatatatgtgtgtgtatgtatatatgtgtgtgtgtgtgtctgtgtgtgtgtatatatatatatatatgactatctggttagccatatatgaaccaaggcctgagggaagagctgatactaagaggaggtttttaaagatgatttagagaatgtttatagaacagtctgtatgagagatttgaggtttttgtttggttggttttgtctttggcagtagcctgaaaaaacacataaagagttaagaatatgttttataggtttgggggaagcatcctgtagagagagtgaatttgaacagaaaaaagagagagggaaagctggcaaaagcaagtctgactcctgatgcaaaatgcatgagaagactggataaaatttccacttgcatgtttatagcagcattaatcctaaaagccaggtgggagcactccaagtgtccattgacggatgagtgaataaattaaatgtggtacatgcatacagtggaatgttattcagcctttaaaaggaaggaaattctaatacatgctacaacatggatgaacctggaagacatcatggtaagtgaaataagccagtcacaaaaggacaaatattgtatgattctacatatagaatataaactatatatacatatgtagagtagtcaaattcacagggacagaaagtagaatagtggttgctgggggagggaggaatgaggagtgggtacagagtttcatctggggaagatgaaaaagttctgtagacggatggtggtgatggttgcacgacagcgtgaatatacttaatgctacagaactgtacacttaaaatggctaaaatcagccgggcacggtggcacacctgtaatctcagcactttgggaggccaaggcggtggatcacttgaggtcagaagtttgagaccagcctgaccaagatggtgaaacctcatctctactaaaaaaaaaaaaaaaacaaaaaaaaaaaaaacaacttagccgggcgtggtggcaggcgcctgtaatcccagctacttgggagattgaggcagagaattgcttgaacccgggaggcggaggttgcagtgagccgagatggcgccactgcactccagcctgggcgacagggtgagactgtctcaaaaaaaaagaagagtcaaaatggctaaaatcgtaaattttatgttgtattttaccacaagaaaaaaaaaggacactgatggagagattagtgtgaacataagaagggctgtttcttcctctgagagtgaagataaaggagaggacagaatggatagagacgactcgtaggtgtgggtaaagcaagttgaggcaactcacccgtgtgctcatggttgtgtactgaacaaatgagatgggactgtgacatgagagcttcgaaagtttagaacagcttctgaggtccctgagaaaaggataccaaagagagaaagcaaaggacatgtctagtgggatgtcattgatgggggtggggggtgctgagttgtgtgattttttttttcttcatctgcaccctgggattggtggtaaatgcagaggacatgtggtactcagacaaaagggaaggtcagtggctgcttcaagtagtcagccaagggcttcagtttcagtagaaaagaaaagcgttaggaagttgttaggaataaacaactattcctaaggtggtaggattgaggaactggagatcttgagaaagtgaaagaacaggaggttgtgtccaaaaaataggctattagatggacttcaaaaatggggcagtccgggcattctcactggagtgaatttgctgaagttcctgtatgtatgtttaacattaatggttacatgtttgtagttttaaggaaagggaccctgactagacaaataattgttgtagtcgataaggaaaatggagaaaggctagtaatcagcaggaattcctagaacttacatcgaagatcatgatgaagagattaggtggaataggttgactttaatgttatgcagaagagaagagcaagatcagttagtgtgtccagctgcgggtaagagaatactcaactaaaagttgtctagatgggaacattttttttttttctggagacagtctcaccccgacacccaggctggattgcactggtacgatcttggcttactacgacctctgcctcccgggctcaagcgattctcatgccttagcctccctagtagccaggattacagacatgtgccaccatgcccagctaattttttgtatttttagtagagacggtgttttgctatgctggccaggctggtcttgaactctgagcctcaagtgatccacctgcctctgcctcccaaagtgctgggattacaggcgtgagccaccgtgcccagctggaacatttatttgtctcatatactgtgaaagcaaatggagaccagttcttgagttggctgattccatgggtcagtgacatacttacaaaaccaggtgcttccatctttctactcagttatccttagccctgtcaacagtctcatggccacaagatggctgcagcagtcccaagcattcctcataaacacagcatccagccgggtgcggtggctcacgcctgtaatcccagcactttgggaggccgaggcgggcggatcacaaggtcaggagatcgagaccatcctggctaacacggtgaaaccccgtctctactaaaaatacaaaaaattagtcgggcgtggtggcgggcacctgtagtcccagctacttgggaggctgaggcaggagaacggcgtgaacctgggaggcggagcttgcagtgagccgagatcacgccaccgcactccagcctgggcgacagagcgagactctgtctcaaaaaaaataaataaataaaaaataaaaaaaataaacacagcatccagcacagaagaggaacatatctgcctatgcttttctctctgttagggagcaaggcttttcacggaatcctccccaccaccctgtcctcaggaccagcaggccaggattggatcacatgttcacatccctctctaatcactggctaggacattgagaatgatcatgatttacccctctgagcctggggaatgggcaccttccaagccagtgaaaggttaatgtccaaacaaaattgtggctctaatggcaaagaagaaagggaggaatggatttgagttagtaaccagcagcatctgccaccgtaaccagtttggtcccttcccacattgaaggtgaaaactgacaaaagttaattgtatgttaaggctgttaagcagctgagatggggatctcttcatggtaatggcacagtagaaagaaacagccttatcccttgaccatgtttatttagagcttacactagggcattccataatgccttgatggttattagacagttattagtaggcagagtttacatgaagagggttaaatgggggaccttatgaactcagtgaaggaacaaaagcagggaaaaacctgtggttaaccataagtgggaagcagggattaaagatttggatttcacagtttattaaactcagtcaacattttttgagcacctgctgtgtgccaagcactgtgggtaggcttaaaggttacagaggtaagatgtaatccctcatatactacacaggtagttaggttgtttcctgtaatgtgctacgtgtgcaaaggaggtattgccaggttctgtggagttatgagaaaaaacattcagcccagcctggtaacccagtagagctcattattgaagagtgagtcagagttcaggagaagaaagttgggcagaaacttcaaagcaaaggagaaacatgagcaaagtcacagagactagaaacagcagtcttaggttataaggtataagatgggaagtggtgggaaatgagacttgatcttgaaaggtagtggatgtcaagtgtgtccattggagttcttacttgcagactatagagtgtacttttcatccactcttttaagcagaaaggggtttattataagatactgggtaccttaacaaaacctggggaagagccagtgagccaagctcagatgctgctcagcaaagagcagagcagctatagatctatgcagcatgtgactgtcatagtgaaacctctgcacagtgctgcagaagaactggatgcttctactaccgtgcttgcccaaagaccagatttctagcacagtcgttatctcatgttgctcatttctaccccaagtcttgtgtgggagcatctgctaggaagaagctaggtctcgtggattgctgagctgctagggagtctgggaaatgtagctgtaagatagtcaagctagaagggagcaggagtgggtactaagtgaaccacctaatagtgtctgccagttttcagtacagctgagcggttttgatgaatttatctaggccgtggggtaccattgaaaagtgttcaaggcagggagtagtgtgaccacatttacatattgatcactggggctatcatgtacaacatggatttaggaggggccaattgggggctattgcaatagcaggtagatcacaaatgatgagggttgacaaggaagcggcgacaaagtgaaaactacgtggaggtagaatttagcaggaattggtggttgatttatatatgagagagtagagggtgatatatccatgtagatgtatccagcatacagttggtcatatctagagctgtggacttggaagtaataaaggagtgggccaagaacagagcccttgggcccacagcccctgccaggcacattgaacaggtgctcatgggtgagatggaaggagaccaagagaagagagcatctgagaaggcaaagataaagcatggctcaggaagtgtttggcagtgaagagggttatgtgcagattagagatcagtgggaaagaggaacagattttctttggacttagtgtgtagggcagcatcctttgctgaagcaaattcagaggccgtttgttgcatcctttttgtgggctgctagttaacacttatcaaaccctttttttcccctaacattgaggtataatatatataacataaaattcacccattttaagtgagaattcagtgattttttggtaagtttaccaagttatgcagccatcaccataaatgtcttagaacattttctaacaactttattgagatgtaattcaaataccatgtatttcacccagagtttacaattcagtgtttttttaagtatattcacatataactgcagcccatcaccaattttagaacattgtcatcccctcaaaagaagaaccttacactctagctgttgcccccttagttttagaacacattgctcaccccaaaaagaacctcagtgtctaaatacaattaatctccattctcaccccccggccatcacttaactttttgcgtagagaactgagaccacacacatggatcttgaagggaactaggcaccatggagtagtggtgaaaggcctaggaaagtggggtctgtagtttgggaaacacataggtcagctaacctaacactgttcacaggaggagatgaaacagaggcagtggcacagttggcaggtgggcttccagcctagagccttaggagaaaccagtttccttactcatttttagatgtctaagaatatataggatttttttttttttttgagacggaatttcactcttgttgcccaggctggagtgcaatggcgcgatctcactacaacctctgcatccggggttcaagcaattctcctgcctcagcctcccaagtagctgagattacaggcatgcaccaccacacctgctaattttgtatttttagtagagatggggtttctccatgttggtcatgctggcctcaaactccctacctcaggtgatctgcccacctcggcctcccaaagtgttgggattagaggcatgagccaccgcgcccagcctagaatatataggatctttagacgtgtttctttttagaggtaggaatgtagctaccacctagagcccactgagattcagctttcagaatctagagacatctcaggagccagggagccacatttcatctttcccttgaacagaacacaagatcagtggctttgcttcattctcattactctgtattagttaagcagtgccgccacatcactgtacaagcatgttttcaggaaggcatatgacgcactcctggtaagatggggcaggaagcactttggggctgggccttccaaccaggtgttcaggctgttcagggcccgcatgctgcaatgagaatttagcagtgactcctcatggagcaggaatatgatgcgcttaacgtattcttaaggacttctcagttttaattataagtttagtaatataagcagaatttaacatccagaattaaggctatttccatttccattctctaataaataaaaacatttgttgaaacttaaattgctcttctcaatgaaaactttaacaagtcttttgttgctgactaaacatatccatctctgaggcctaaagctttctccttctgtgttgggcagcaaccctgccctgcccttgtttgaactgaaattgaaagtggctcctcagaccaggcacggtggctcacacctgtaatcccagtactttgggaggccaaggtgggcggatcatctgagttcaggaattcgagagcagcgtggccaacatggtgaaaccccatctctaatttttgtaaaaatacaaaaattagccggccgtgatggctcatgcttgtgatcccagctccttgggaagctgaggcaggagaatcacttgaacccgggagcagaaggttgccgtgagccaagatcgcaccactgcactccagcctgggtgacagagcaagactccgtctcaaaaaaaaaaagaaagtggctcctcagatttaggccacttcttatatttggccactgccttgcagccttgtagttcacattgccaccctggtgttggtgtgacatggtgtcccatccctgaagctgcctcccttgttactcaccttattgctgtctgagaaaggaaatgggtgattcacaatccttaaatcaagtggctttctcttacctagaacttctgaattgaacatacatttaaacaatgacgttgaaaagatgtataactggagcaataaagactgaaaaagaaagctgcggccagttgttagtttttccgaggctccttatctgttgagtggcaccccaggctcccttgctcttgtcccccactgcctgtgatagagaagcctcttgttaaacactgggagctacttcaccacactcacaggctattcccagaaagattttgcacctgggtaaagcatccttgagaaaataacctgttttctttcccagagtgaacccagcttcatccctggaaccaccacatatgcttttcccctggtgggttcttaacctgttaacactgaaatctacattgttagctgctgataaagcatcagaaacatggtctaatctgggagtcagtatttggatttcttttttctttctttctttttcttttttttttttttttggagatggagtcttgctctgtcaccaaggctggagtgcagtggcgcaatcttggcttggctcagtgcaacctccacctcccaggttcaagcaattctcttgccttagccaccctagtagctggaattacaggagtgcaccaccacgcccggctaatttttgtattttagtagagatggggtttcaccatgttggccccatgctctcacactcttgaccttagatgatccgcccaccttggcctctcaaagttctgggattacaggtgtgagctaccacgcctggcctggatttcttattctagtatttattaataattcaatttgagaagactacctagactatttgagttttgtaatctctaattcctagctctaaagctaatcccttgtgaatatctagactggaaatccccgttaagtacctgcacattttcaggttttgttaactggttggagtcagactggagaatttcatttctattcatttttggttttctctttctttttctttccttccccacaccccagggctaccaagaaaagaacaaattcattgctgcacaaggtaaagtaatgacaacttttttctgttagatttaaccatgatcacataatgggtttggtttttttctcccaaatgctgagtggattaaccagaatgctgtagcttttctgtactttttaccacctgaaagaattataatccattatacaggtttacagctaacagccttcatcttgatgacttagtatccagggatccattaaaagaagtctttttgtgtatgtatattaaaaagactggaaaaggctgtatacacaaaacacagtctaataaggccctctgtccttggggctagttaaccttaggttccagccaggctgctcagagtttgaattaggaatcagtttccagagaggatcagccacctcacagggtccaggctggttctcccccagctcatgggcctgagcctcaccattattcacagatagttggtctaggaaccctcagatcagggacccagcaccatgtcctttatgtgttctacacacatttccaggcctgctgttctaacaactgtcttcactctttgaaccctagcaaaaatatctggatgtttgcagcattaaaaagtaattgaggccgggcagggtggctcatgcctgtaatcctaacactttgggaggccaagacaggaggatcgtttgagcccaggagttcaagatcagcctgggcaacatagtgaaaccccgtctctactaaaaattagccaggcgtggtggcacacacctgtgatcccagctacttgggaggctgaggcacaagaatcacatgaacccgggagccagaggttgcagtgagctgagattgcactactgtactccagcctgggtgacagagtgagactttgtctcaagaaaaagagtcattagggactacaagatttataaaaacaaagttctcctcccttttcttttcacttttttagtctaatgcccctggggcaaccatttttatctattggcttcttatgatagatgacatcatctgatccccttacagagcacctccccctcagtcagacagacgtgtacccacatatcctccccattctcccagaagagtcaaatcacaatttggggttaaggtatttattattattatgagtttacaaatattcacagccgaaacacacagtattatgttattttttgtatagtttttttcccccttcttttttagtcattgtgttttttatatacctactactgattttcctcccaaactctttaccagaagtatatatcttctctcagtacctttagatacatgaggtttaatttttttatcttgggatccttctagaatcttctttcttcagttgcattgtggattggttgctctctatcctctggcagagttatcattctaagaccagtaccctgggaattccgttagcctctctgctgtgttggatctcatttattttcctctgtttgcctctcatttttgtttagaattttctagtgactttccgaaaaaggttatatgggaggtaaattttgaattctagcctgaacaagtcatccaacctttctggggctgatgacacccacctcagagcataataggaaggagtaaatgccatatgaagcacttagctcactgtcaggtccataatgtaggtattctgtgagcagtcatgatttctaattcccaactgtaatatccttgggagacatcattcgtgttctgtttatatttttgacagccttccacccagccccatccttgtgcagtgcctggcacatacatggtagaaacatggaaaatactcaattagtaacggggtggatggatacatgggttagatatttagctggggacatttgggcacaagcttccaaaagtcaggaatggatgttcccagcctcccagcatctttcttcttggtgtatattctcttcatttttgctgttggctactttaggaccaaaagaagaaacggtgaatgatttctggcggatgatctgggaacaaaacacagccaccatcgtcatggttaccaacctgaaggagagaaaggaggtaagtggaaaaattggatgtgaacagcagaaggatcactctgcatataagctctgagtttaagcctggctgtctatcctttgtgggtgctgtaccagtagttcatccagaaagacacaggctgaagtctatcagactttgctatggcctggaagccccagatatgaacctcaggtgtgtgcctagagcacattccctgtatttggtagtcaaacaactcaccctggttccagaacagcctgaaagagactgacttgggccatcagctaaggaaaagccacagaggggttttttttgttgttgttttgttttgttttgttttgtttttttattgatcattcttgggtgtttctcatagagggggatttggcagggtcacaggacaatagtggagggaaggtcagcagataaacaagtgaacaaaggtctctggttttcctaggcagaggaccctgcggccttctgcagtgtttgtgtccctgggtacttgagattagggagtggtgatgactcttaacgagcctgctgccttcaagcatctgtttaacaaagcacatcttgcaccgcccttaatccattcaaccctgagtggatacagcacatgtttcagagagcacagggttgggggtaaggtcacagatctacaggatcccaaggcagaagattttttcttagtatagaacaaaatgaaaagtctcccatgtctacttctttccacacagacacggcaaccatccgatttctcaatcttttccccacctttcccccctttctattccacaaaaccgccattgtcatcatggcccgttctcaatgagctgctgggcacacctcccagacggggtggtggccgggcagaggggctcctcacttcccagtaggggcggccgggcagaggcgcccctcacctcccggacagggcggctggccgggcggggggctgatccccccacctccctcccggacggggtggctggccgggcagaggggctcctcacttcccagtaggggcggccgggcagaggcgcccctcacctcccggacggggcggctggccgggcagggggctgatcccccaacctccctcccggacagggcagctggccgggcgggggggctgacccccccacctcccggacggggcggctggccgggcagaggggctcctcacttcccagtaggggcggccgggcagaggcgcccctcacctcctggacggggcggctggccgggcggggggctgatcccccaacctccctcccggacggggcggccggccgggcgtggggctgacccccccacctccctcccggacggggcggctggccgggcggggggctgacccccccacctccctcccggacgaggtggctgccgggcagagacgctcctcacttcccagacggggtggctgctgggcggaggggctcctcacttctcagaccgggcggctgctgggcggaggggctcctcacttctcagacggggcggttgccaggcagagggtctcctcacttctcagacggggcggccaggcagagatgctcctcacatcccggacggggcggcagggcagaggtgctccccacatctcagacgatgggcggccgggcagagacgctcctcacttcctagatgggatggcggccgggcagagactctcctcactttccagactgggcagccaggcagaggggctcctcacatcccagacgatgggcggccgggcagagacgctcctcacttcccagacggggtggcggctgggcagaggctgcaatctcggcgctttgggaggccaaagcaggctgctgggaggtggaggttgtagcgagccaagatcacgccactgcactccagcctgggcaccattgagcactgagtgaacgagactccgtctgcaatcccggcacctcgggaggccgaggctggcagatcacttgcggttaggagctggagaccagcccggccaacacagcgaaaccccgtctccaccaaaaaaatacgaaaaccagtcaggcgtggcggcgcgcgcctgcaatcgcaggcactcggcaggctgaggcaggagaatcaggcagggaggttgcagtgagccgagatggcagcagtaccgtccagcttcggctcggcatcggagggagaccgtggaaagagagggagagggagaccgtggggagagggagagggagagctgttttgttttgttttttgagacggagtctcgctctgtcgcccaggctgaagggcagtggtgccatctcggctcactgcaagctccgcctcccgggttcacaccattcttctgcctcagcctcccgagtaccacccgccaccacgcccagctaattttttgtgttttttttagtagagacggggtttcactgtgttaggcaggatggtctcgatctcctgacctcgtgatccacccacctcggcctcccaaagtgctgggattataggcgtgagccaccacgcccggcccacagaggagcttttttcccctggtttctctagttccttatttccctggttttctgccccacctgctgaggcctttggtatatcctggatcagcagagggagctttatgaactgagaccctgcaagccaaagggaatttgaggccttggcctaatcctggaggcagcctcctaactgggccttttccttttgtggctaccaagtgcatgcctggcctaaccagctctatcactgggccacagccagagccaattctgggtcctggggtcgagccccagcgaggaatacctatttgttaccgtgtttctcaaggatggcccttgagtcaccttgatcctagggtatcgggtgtcatgatcaacagctccacagtggcatgggaagacagtgctagggctgggctttaggttagtttcctccaaccaaacctcttgctcttggaagctatccaaagctcaggcaacagaaaaagctctaggcctctcatggcaggtttacagtctgcatcagtctaccctggtggccccctcatagcagactgctggttcgaggggttcaaacaggctttctcctagagcatgacctgaaatgttgtgaaagtgcagattttgtaggtaagatggcttcagattcgccctgaaccaagggagtgtgggtgggaaacattgagaagtatggggctagggctgtgtgtaagttaggagactgtgctcaataggatggcggctaaggaacttgagaaaagggcaaatttgaataagtaagtgtgcaactgactgagatagagaagaggtcaaagggccttctgggggactttaatctgggctttgtgggctcttccttccaggccctttgcatctgccatgggcaggaggtctaaggtcagggaatgtatgtctttttctttccagtgcaagtgcgcccagtactggccagaccaaggctgctggacctatgggaatattcgggtgtctgtagaggatgtgactgtcctggtggactacacagtacggaagttctgcatccagcaggtagtgtctcctctgtcctttctcagttcttatgttggatctgctgaccagtaagagggaacaggctggatcatcccgctgtggtcaggagttgctgagtatgcagtatgtgaattctgaaaccagatatccgggctcaggggaacttgtctgtcaaagctaaaggagcagtattttcatgactggtgaaaaattacctgttgagatgaagtctgatcatttagatatgaccaagcactgtggaaagggagcatggggaggcagtgcagtctcctaggtgcttgactcacctttctcctcctttcctactccaaagactcctgacatcaaggatgtgatgggcctgcccctggccctccaggcaaccctggagacctgagcaaaggtcaccttcagccaaggggcagtgtggtactgcgaaaagaggacttagctgggagcactgcattttagttctgaccctgccactgactagttgtgagaccttgtgtctgtggttaactaactcccctgggtacacttacttttccattgtcactgacaaccacagctgtcaccttccctcccctggtactgcccacccttgggtatcagggccaacacacaggatctcctcacttcacaggtgggcgacatgaccaacagaaagccacagcgcctcatcactcagttccactttaccagctggccagactttggggtgccttttaccccgatcggcatgctcaagttcctcaagaaggtgaaggcctgtaaccctcagtatgcaggggccatcgtggtccactgcaggtcagtgtggcctgacccttgtacccccacccccacatttcgcccccatggccagagcaggggaacagcacaagggccctggctgaggaggctggcacagagtagatgacctactggggcaccagcgcaacagccagagactccaagttctagtgcagggtggagaatatgacttgaggaaggagggtagggcagtcctccaagattaggagttgggagaccctgctatgaagccaaaagactgggtcaagtgctggccatgtatttttgcagccttcggacccttctagctggaggtcaggattcaggacatactggagttgttggctcctggagagccccagctctaccccattcagaattaggatttagaccctgaaggaagagcccctgcctgtgttgcccctccctatctgctcccacaaggcaggctggccatccctataaccccctgctctctggctacagtgcaggtgtagggcgtacaggtacctttgtcgtcattgatgccatgctggacatgatgcatacagaacggaaggtggacgtgtatggctttgtgagccggatccgggcacagcgctgccagatggtgcaaaccgatgtgagtgatctgtgggtcaggtgagggtggggggttccaggactaaaacatctgcccacattgaggattcactcagtctcacaggttattgtaaatgattactatagagtgtgattgtgggggaaagaaagatagatcacactgttaccgtgtctatgtagaaaaaggaagacacgagaaactccattttgttctgtactaagaaaaattcttctgccttgagatgctgttaatctgtaaccctagccccaaccctgtgctcgcagaaacatgtgctgtattgactcaaggtttaatggatttagggctgtgcaggatgtgctttgttaaaaatgtgtttgcaggcagtatgcttggtaaaagtcatcgccgttctccagtctcaagcacccagggacacaatgcactgcggaaggccgcagggacctctgcccaagaaagcctgggtgttgtccaaagtttctccccactgagatagcctgagatatgccctcgtgggaagggaagggtctgtgctgaggaggattagtgaaagaggaaggcttctttggagttaagataagaggaaggcatctgtctcctgctcgtccctgggaatggaatgtcttggtgtaaaacccgatcgtacattctatttactgagataggagaaaaccgccttatggctggaggtgagatatgctggcggcaatactgctctttactgcactgagatgtttgtgtaaagtcagacataaatctggcctacgtgcacatcaaggcacagcacctttccttaaacttatttatgacacagagtcctttgctcacatgtttttctgctgaccctctgcccaccattaccctatagtcctgccacatccccttagccgagatagtagagatagtgatcaataaatactgagggaactcagagacgagtgctggcgcatgtcctccgtatgctgagcaccggtcccctggcccactgttctttctctatactttgtctctgtgtcttctttctttcctcagtctctcgtcccacctgacgagaaacatccacaggtgtggaggggctagcccctttcatgtgatgaagggctcttataaattatgtattcaaagaaatcgagcacagaggaggttgtggtttcatgcctgggagagtcaggaaggcagatgacaggttactggacttcaaagattagggaacaggcagctgaaagagccagtgcccagagacatgatgaagctcggccacatctgggagcagcagtgagattggctctgcagttggggcatagcaccaggagggaggcagggaccagactatcacgggctttgggtgtctccagtttctgacagccccttcagactattaaatctgcactctcagaatgaacaggaattgagtttgtccttctctccaggcgtccaccacccccaagatagacctggacccttcttcccaagtaaagcacccccacagggactcctgcatttcaagtcccacttcactaaattgggataataagagggagtccttttattcctgctaggatcaaaggagaaatggactggagtgaagtgggggtgggaacaggtgatctggcatgagaactatgttgtatgtaaccaagaacttctgtgtcattcatgtttcagatgcagtatgtcttcatataccaagcccttctggagcattatctctatggagatacagaactggaagtgacctctctagaaacccacctgcagaaaatttacaacaaaatcccagggaccagcaacaatggattagaggaggagtttaaggtgagttggagctggataacctccttcagattgaaggatccttgtaatctggggaacatgggatgcctgactgtgcatttgccaacagtaaatccccttgtgaggcatgccagtggttaaggagatggtcctttcctcgtactctggtaactctcaactcatcctgcacgttggaatcactttggttgtgttagagtagggagaagcaggcaacagtattttaaggcccctagccctccgaggtgattatgatacacagcaagagcagttttttctgtaagagccagataataaatattttaggctttgcagcccacatggtttctatccagctacttagtgctgtctttgtaacacaaaggcagccataaccaataggtaaatataatgagtgtggctgttttataaaactttatttgcaggcagcaggcagcaggccagatttggcctctggaccttagatcactgatagctcctatatgccactagacaatggttctcaacacacctaaggcatatgtcacactgtcatcagtaaaagtgctctcccaggctgggcacagtggctcacgcctgtaatcacagcactttgggaggctgagacaggtggatcatgaggtcaggagttccagaccagcctggccaatatggtgaaaccccgtctctactaaaaatacaaaaagtagccaggcatgatggcacatgcctgtagtcccagctactcaggaggctgaggcgagagaattgcttgaacccggaaggcagaggttgcagtgagccgaaatcatgccactgcactccagcctgggcgacagagcgagactccatctcaaaaaaaaaaaaaaaaaaagtgctttctcagaagcaggagattctgggttggggtggggaggaccacttagagaagttcttctcaaatatagcatgtgcacagatttctttgggatcctgtcaagatgtgggttctgccaggcacggtggctaatgcctgtaatcccagcactttgggaggccaagtcaggcagatcacctgagctcaggagttcaagaccagcctgaccaacacggagaaactctgtctctattaaaaatacaaaattagccaggcatggtggcacatgcctgtaatcccagctacttgggaggctgaggcaggagaatcacttgaacccaggaggcagagattgcagtgagctgagattgtgccactgcactccagcctgggtgacagagcaagactctgtctcaaaaaaaaaaaaaaaaaagatattaggttctgattcagcaggtatgagttagagcttgagattctgcatttctttttttcttttctttttttttgagatggagtttcactcttgtcacccgggctggggtgcaatggcgcgatctcagctcactgcaacctctgcctcccgggttcaagggattcttctgtctcagcctcctaagtagctgggtctacaggcacgtgccactacccccggctaatttttagtagagacagggtttcaccatgttggccatgcgggtctcaaactcctaacctcagttgattgcccaccttggcctcccaaagtgctgggattacaggcatgagccaccacgcccggcttgagattctgcatttctaataaggtgaagccaacgctgctggtgtatgggctacactttgagtagcaaatgtcaagaaggagcctcaatcgggaagggaggatgcaattctgaataagtttttttgaagagccttaggcagcctctgggggtggaactgcagagtggacacactccctcctacgatgctggaatcccttgctccaggatcacaaaattccaagccaggagaatctcaagagagtccacaggagcctggaaggtagcatttcccaaacagtctcttggcttcagggttccagctgaacatatgggaacagaggtcagggccctggtgagaagagcagtatggagccagagtggcctggaggtgcaggccaagggacaggcataatcttgtcaagttcagttactgggatcagtaatgtttcccctccccttcccaattcagaagttaacatcaatcaaaatccagaatgacaagatgcggactggaaaccttccagccaacatgaagaagaaccgtgttttacagatcattccatgtaagagccctcccgccactccaaagccttattgccccatccctcaattccctccaccccttccatttctcaggtactagttaatgattggcgtatagacaagaatcatggcattgcctcttgttgcacccacttaacaacatggcgttgccttttgttgcaccttagtggcttctggaaataacgtaaaagccaaaggctttctccctaatgagctaggaacagacatgtccttgcccagctgggattctgtctgcccagggcctgaggtgggagcaatgcaaggagagggagaggacaaatgatattggctagccataagccgctattcttcttacagatgaattcaacagagtgatcattccagttaagcggggcgaagagaatacagactatgtgaacgcatcctttattgatgtaagtggtgggtgtgacccctgagcccccaacaccccgtggagattcagccagcacttgcagtgcctccctcccatacctgctggggaggatcatgtttgaatcagtcaacaaatagtgaattgatactcacccacccactcaccctgtgcattaggtctgtccagctccatagagcagaaggtgggggaaaacagatggcatgcagtagtataatacctggaagaaaaagttcacagagcagaccacagccaagaggaacctggctgccccctgatctttcccattcctgccctcttcatcctagctctaatccctgttccacttccctgtctcttacagaaagcaaccagcttgtcagatagggtttcgtccttggccacaggggagctctgcatgggctgagtttgcctccgagcagtccccattcccttctagtggtctgtcttctccactagtccctctgtgattaaaccatctcacccttgcaattaacctggcctgtgcagggctaccggcagaaggactcctatatcgccagccagggccctcttctccacacaattgaggacttctggcgaatgatctgggagtggaaatcctgctctatcgtgatgctaacagaactggaggagagaggccaggtgagttcaaaaggtcctgggtggtgagagacagagacagcatgaaaagatgtgtgtgtaaatggggacgttgggaaggcaagaaggtgtttggaccttgtctttgacttatacggtccaaagagtacgtttgcatagtataagtacatacttaaaggtatataaatacatatgcatttccaggattgcccagcccgttggtgtctaagcagtcattagcttctcccaagactagaaaagcaatgtgatctgagcctccatgttattcccagacagctcacacccttgcactttctcctgaatacagtccccctagcctagcctttgcacagtgccccaggcggggggggcaccctctccttcccagtgccccaggcagggcagataggtcaaggttctgaggtggacccaatatgagtgtccctaagaagggattgcctcattgctgactacataaaataaagcagtagaatttgagaaattatacaaacaagaaacttacagtctaatattcagtaataaggaaatcttttaaagaaaaaagccctcaggtctattaaaaagcagagctgtccggaaactcatactaaaaagggacactagcagtcccctaggtcaacttcctctcagtataggaaacctcctaatattgttcctgagtcagaatcatacagcctctactaagcacattcaatctcagggatatctccctcaccccccacattatggggggacccagtctgtgttctgacaatgcttattcttttaaaaattatttctgttgaggttgcacattgcagcaaatgagcggttcactatgtctggggtgtcacttagcagggatgagaatctagagaatgggcctggagagaagctagcaaggcctggtgagaaaattccttctaagccacagtgaagagtttggtcttcctaaagcaattgaagagcccttgacaacatcccatttgtgttttttaaaaaatccctctggcagcagtgagaaggactcattagaaatgcgaaagctgtggcagtaatgctggtggcctggactcgggtggtgagagggtgctgtcccagaaagggtgaagtgaggaggaattaaggatggcacccactcatgactcattgaatttatagtcaaacatttaaaatacaaagtatgttttacattagttgtctcaagtcactagttgttccccatctgtacttgtgttaactttggtacaaggctttacacatattttctcaccctgatgtttcattacatcaggattttttttttttttttggttttgtttgtttgtttgtttgtttgagagagggtctcactttgtcacccaggctggagtgcagtggcacgatcttggctcactgcagcctcaacctcccaggttcaagtgatcctcccacatagccctccaagtagctaggactaaaggcacgtgccaccatgcccagctagtttttgtatttttttgtagagacagggtttcaccatgttgcccaggctggtcttgaactcctgggctcaattgatccacccacctggttgacccaaagtgctaggattacaggtttgaaccaccttgcccggcatttttttcaattttgatcagtcatttaactcattagctattcttcctagacttgtatcatgtacctaatcaacagacatactttgtaggtcttcatcatcttttttttttttttttttgagacggagtctctgtcacccaggctggagtgcagtggcacaatatgggctcattgcaacctctgcctcccaggttctggcaattctcctgccacagcctccctagtaactgggattaaagacacccaccatcatgcctggctaatttttgtaggcacggggtttcaccatgttggccaggcttgtctcaaactcctgacctcaggttatctgcctgactcagcctcccaaagtgctgggattacaggcgtgagccactgcgcccagtgtcttcatcatcattaataacaatactgatgaggtgggaggttcggttaaggtgcttggctttgcactcaaggaagcacacacctgagtaacaaaagctgtttaggaaatgagccactgtgttctcaggagctaggtgcctgttcctgccgtctctgatcagtcgtgatggaacctgcagatcagaccagggccctacctgtggttccttctgcacccctgcccttcagatctgtgatgggcaggaccaaagagcaggccgaagagctggaaccacgagcacaaggaccatctcggcccactgccctgtgataaaatgtggcccagtgaacatctccgcctctgtccagtcagatgcaggctcttccatccttgaaaaggacctagtgagagtaaagggcagggggcaggaagcatttcatgtgtgtggcggtggggagaagagtcgtgcgcacacaaattctgctgcctgttgagtgaggcctctccctctgccttccactgtagcttatgctctgtcttcctaggccagtgaagcagacagtagtgcttgccctcaaaagcttctgagtggattggaacaggatgttagtgatgttctttacaaggcctcactggcccccaagttcactttctgttccattcatgttgtcaagtgtagctcccagaagtaattaacgcactaagcctaaatgatgcaatgaaaggtgcctacacttatacagtgacactaccatcctcacctacaatattaagttcccagagaaaaaaattcgatcccataatataaattctgtacttacaaattaaaatctcgaaggaattaaaaatttttaattatctccctctgctttttttttttttttttttttttttttgagatggagtctcactctgtccaccagactggagtgcagtggcacaatctcagctcgctgcaacctccacctccagggttcaagtgattctcccacctcagcctcccgagtagctgggattacaggcatgcactaccatgcccagctaatttccatagtagagacagggtttcgtcatgttggccatgctggtctcaaactcctgaccccaagtgatccgcccgccttagcctcccagagtgctaagattacaggcatgagccattgcgcctggcctccttctgctctattttaatcaaaagggtccaccaggatgcctgggttccctcagcagctgcagcttggaccatcatcagcctgggcagacagagcagtgccaggaactcccatgctgggtcaaccctaggcctagcccaaccctaggcctcatcctgcttctctaaagcatagtgaaacctgatagcattagtcttcacaaagctgtgtgtccccatcaccatgtccgccttagacctcataagagacataagacataagagacttcatgctatctggtggaaagacaaagtaggagaaaagacagaaaaccttccctgtttcacttctttaagatgctattatctagaggccgtaacgtgaacacacaaatctgagatgaaactccagtccccagcttttcttctactggtcttgaatccccattccccatcttctgtccctcacccactgatgactttaacacctggcttactgctccttttgagcccctgttcctgactctgcttttggaggcatcagtcaccatgtggatgatccatctatcctcaatctttctattcctcagcttcctcagccacctgatcccatggtcaagtcaccatctgccctgtatctgcactgcccttggaatctcaacaaggcatccgccctgtttactgcctccttcctcccacctcagtattctcttttattccagtcatttttgtcttcatcaagtccttagagttattgatgcctccactttctcaacatcagtcacaccgaacatgtcctcaccttcctccttactctgtgtgtttttgagttctgtttttgagcgtttgagttttctgatttgagtttttgtggtatgtcattattacctttccttattccctcatgctttcttactttcatagcaaactctctagtaaaacccagttatatgcctctatctgatatagcaaacatcactgggcaaaaacacaaaacagtgccaaatgctctcacactgaactcatgaccacaaatctcatagaggtaattggtgccacctagcaatgctattgctctttcttttcttcctgaaacctccagcatctgctcttgcctgtcccatcatactcacaccttagcttgtgacctggcctcattcttctccaagaaatcagacaagaacactgtcatcctcccacccccaaacaaccagcctcttcaaatctgtaccaactctattctctcttgttacagtggaaaagggtttctgcatctctcaatccacctgtccactgtgctcttggccccattccgtcctgcctgctcagggatgttgctgctataaccatcttctctcccacctccatcagcagttcccctctttaaccactactctcatcagcctatacatgttacatttcctatcttttaaaaacaaaaaatctgctaatctcactttcccttccacctactatcctatttctctgcaccccttcccagcaaaactcctttaaagagttggctttcggccgggcgcggtggctcacgcctgtaatcccagcactttgggaggccaaggtgggcggatcacaaagtcaggagatcgagaccagcctggccaacatggcaaaaccccatctctactaaaaatacaaaaattagctgggcgcgatggtgcatgcctgtgatcccagctactcgggaggctgaggcaggagaatcgtttgaaccagggagctgaaggttgcaatgagccaagatcgcgccactgcattccagcctggtggcagagtgagactccatctcaaaaaaaaaaaaaaaagagttggctttctccctgcaagttctctgttcgctctgttccttccaggcttggccccactgggactgctttagtcaagatcaccagtgactgtcctcttgccaaatccaaaggtcatttctcttttctgatttttttttttttgtccttacagcagcatttgaaagagtcagtacctccctcctcttcctcagaacacttacttccgtagcatcaccccactcactaacctggcagctcctttgttatttctttgtgacctcctcctctaaaacattggagtatactagactcgggcgctagcccactctgttttcttttgacacactagcccttcaggatctcagccagtcctatggctttaagtacaacccatatgccagggatcctcaatctgcgtctctaggccagtcacctgtcccccttcccaatgtgggctcctgatttcctccttcccccgacaccagtccaccccactcttagccatctaaataaatagtaccaccttctgcccagttgctcatgtctaaaatccgggagttaccttccttcctcccctctcctcacccctcacatccagtctgccactgagtcctgatacaggcagagcctccccacttttctccagcgtaactgctgtcatctgaacaagccctcgtctctcactgcttgcccgtgggactgtgggcatgactcatatgcgcagcctcgtctgcagtggcctggcaactggtcctcctgctctcatcctaacccacttttagtttttcaaatggcagctgctggtccttttgaaaatataaatcattgtcactccttgtcttacaaatcctgtttgaggccaggtgcggcagctcacgcctgtaatcccagcactttgggaggccgaggcgggtggatcacctgaggtcgggagttcgagaccagcctgaccaacatggagaaaccccgtctctactaaaaatacaaaattagcgggcatggtgatgcatgcctgtaatctcagctactggggaggctgaggcaggagaatcacttgaacccgggagccggaggttgcagtgagccaagatcgcgccattgcactccagcgtgggcaataagagtgaagctccatctcaaaaaaaaaaaaaaaaaaaatcctctttggtcttccagagatcttgagagaaaatccgcccatgtatacaaaatttagagacttttgatcagatgtggtggctcacgcctgtgtaatcctaccactttgggaggctgaggcaggtggatcacctgaggtcaagagtttgagaccagcctggccgacatggtgaaaccctgtctctactaaaaatacaaaaattagctaggcatggtggcgcacacttgtagtcccagctacttgggagtctggggtgggagaatcacttgaaactgggaggcggaggctgcagtaagtcaagatcatgccactgcactccagcctgggcgacagagcaagactctctcaaaaaagaaaaaaaaaatgagactcttagtgttgatacctagtccctagacttgatatgtatttctgtctgagagatcatgctcaattcctccagcacacacacactgtggctcacacccatggggaccttatggttctgatggttttaaaggcccagtcttcatcccagctgagacactgtgtaaagcagtgttgagaaggcactgtggtagcaaaatccattccacccaccagtgccataaaaactaatataatgcctgatcgaggtgagccttaatgagaatttttttttttttttggctgttctggttgaagagaggcccagggcaccgatccctgaggcatccccagggcttctagagaacatgggtggaaaagcactagtccagggcatgttcttgattcaacactttaataatcatgattttatttggactgtgagactattcacaatttctttttctacttaatttttttccaaatctttcaatgacattatatgtatggttgagaatttttcaattgccagtagtgaagaatctcagatcttacccccaaattctctaaagaaatgggcagcataactgtgtgatgttatatttatgtatttatgccttggcttgttctgcagacattgaacaaattcatttaccagatactgagagcctaccatgtgccaggcattgtgcaaggtgtggggaatacagagatgaaaagagacgcagccactcccacaaggagctgtagagggaagtgagccaggtgcaagcaaagacagacagtagaccacctcctgctcactagcaaggacagaaaggcgagtgctagcaacttgaaggtaccttgcagatcaaagagataaaggtaaaagggagaaaggatactgtggcctgggcggtggtgaagcccatggctgtgtgggaatgtgaattggttctgattttctgaattagcagtctggcggatgtaagcagcattaaatatgaaaacaccccatgggagaaaaagaaaggaattggaacaaagattttcactcgtcctcctctccctgcagccaccaagtattggataccctgtgagcctgtagtcagagtcctttacagaccccggcagtgttttagatggtctctggtgaggatcggaggttaattggaatgatgtgatataatgatcctgcaagttttcaataccttggggacgaagcgtatcagcgtaagaggtggctgtactgagaggggtcaggctgctcgtgggcagtgctgcttctacacatgtggtactctgagctcctcacctctccaacctgtctctccaggagaagtgtgcccagtactggccatctgatggactggtgtcctatggagatattacagtggaactgaagaaggaggaggaatgtgagagctacaccgtccgagacctcctggtcaccaacaccagggtaagatgggtcgtgggtggactctgcccacaggaaaagcagggttacccctgcctccctgatccccttttttccaaaggagaataagagccggcagatccggcagttccacttccatggctggcctgaagtgggcatccccagtgacggaaagggcatgatcagcatcatcgccgccgtgcagaagcagcagcagcagtcagggaaccaccccatcaccgtgcactgcaggtatggctcacccttgccctcagcgggagagagaaagcgaggaggggcagataggggaagctgatgaccatgggtcagactgaagaaagccatacaagagcaagatattggtgagcacatagtagttgagattgatgccaagacaggattggatgctaagagagaggaccttggagcttgaacttggcacaataagtgctaggggactaatgttcagatagtgggcaggagagcagcaggggagactggcagtggagaccccggttgtgctatgaacagagggtgaaagagaagaggagtcaagggtgtctcccaggtttgagcctgggttggtgtgaccagcagaagagagacagtaaagaggtttgtttgaggggaaaagttgaattttgtatggggcatgttgctggaggttacgttttagaaaaaatgcactcctttacttagaatcctaacaacagcttacaaggcccaatatgttctgaggggtccctggccagggccgggagaggatggtgtgcaccatgggctggctctgagcacactcctgccatgggcctgagatgccagtttcccaggcagccacagggctttgcccaagccttccctgagtaccctgccagaactcccactcctcttttctctttccttaccacacatcttcttgtctggggacattgctaaaccccacagtccctgcctcagagtaggcactcagtgtctggtgagtgaatcagctgatgacattgaatagggggatattgtcaaggtcagagtctggattccgtggatttgggaagaaagtgaaagacatggaaaggaatcagcagatacacaccagtgtagggagtggggtttgtcagaaaaagggaaagacaggactagagctagttctaactgagcgaacagcaggtcagaacaacctaggccagcatgtgcaggtggacagcaatggctctgtgctggtggggtgtgagtgaaggtcgtcccccacggtccaacaggtgagtccctccacagcacatggggccatgcaggaagggcacagggtacactgcctcccgacccagaacccctccaggctggtgggtccacagggcaaaggcgagcaccagctgcctgcccccacctcttctgccactcaccactgtcactcacccccttgcacagagggccatcacaggtgtggtaaatgtgtctgctctgttgcagcgccggggcaggaaggacggggaccttctgtgccctgagcaccgtcctggagcgtgtgaaagcagaggggattttggatgtcttccagactgtcaagagcctgcggctacagaggccacacatggtccagacactggtatgctgcccacatatttgtccctgccaccacaccacctgcagcccttctctcagggaggaggctcttcagaggggcccacccagtagtcagaagactgtctaaacacagacctgcccttgccctcccaaggtgccccaaatacacaggaaacattgggaggcaggatggcagcaatgggagcatagcccctgttgccagaggttgggccaggttagaaggggtgtctgggtgccccacagggctcatctgtacttctctgtgggtcttgggtaaggaagatccatgaagagtacctgcctttgggcttgggctccctgttaagaggtctgactttaataagccgcacatccacagaggttttcctgaatcccatggagctagaaatgtttggggggtaaagaaaagtgaatgttaggaggtttgggagacgaggttctgagagccagggtgcatgctagcctggcagccatggtaagcgtgggccatgctcagctgcactgtctcccagcccagcacatgcctgtctgacctctgtggggcctgggtcagctctggtcagctctgcttgtagaaggtctgctgcattcagcccggaaggggaatgctgtcagaactctggcaggcagatcagagctcaggtgaaagttcaaaaacattcagttcctcttgattttccatcttcaacaaaaaaatgagtctgttaggaattacaggtactgtgtgttcttcagtaaccctgactttttccctacctttcactctccaggaacagtatgagttctgctacaaggtggtgcaggagtatattgatgcattctcagattatgccaacttcaagtaagcggcaacaagggtccgtggaccaggaggattgcctttaatattttgtaatattctgttttgttaatataccccaaattgtgtatatatcttataactgttttagaaattggtacataggcttctattacctattaggtggaaattttatatgtaaatgtgttagcactgatagtcctttttccaatgttttattggggaattaaatagtgtgatgtttggattgatatcgtgaaatcctcagccgagaaattgggctggattgtgctttggttaatacatctttccctaaagaagataaacacaaaatccattccaggtagctcggcaccaactaagaaaaaaagcacaaagttctcagagctctcgaggaaagtggttgtccccgtaccaccatgcactgtaaatatccctcccctctctccctggtcccctcccccatccccaccactgatatcatggggagtaataggaccagagcggtatctctggcaccacactagggactatcaggtaataaaagctttgactccctgaggaaatgtctctccctttgtctgggggtggggcagccatacaggctggggctctcctcggctgttcatggccctcctgttgctgttctctctgagttatctgagagaggccacagtcccccagctcctcctgtccaccaaacacagcccttccagttcttaggtgatctccaggaccctcctttcattcccagcacatctttggtttagtggtcctggccagcctccctccctaggaaggtggccaggtcctcactgagtctccttaaggacaggggcacaggggagactagagctggctcagctttgggctgaggccagtctgacctctccagtctgtggtgctttgctacaaaactgtctggattgtgtcaccctatctaggataaatctttatgtccacatatattgtgttgaattgttcccattttctttcatacgtgtcctcatttctgggacagtgtgaatgtttctcagatctagaagtcagatggtgggagtcttagatccgaacttggttttgagtgacatgttagacaaaagtgttgaacttttgtttcttaaagaagctggatgttcatttatgtctcccgtaacagtctgtgctgtccagagacccagtatccttaggatattattctcatcctcatggttgaagctgggtcactgccatgtccataatccaccctgaggaaagagcatggagagccagcagcttcatttctaaggacaggaagccaaatctgcacttttcacttccactcataatccaccccgcattccactcatcagcttcacaagtaggttttcacctggtcatagctatgcctaactacagggagtgctggggaagtgtgatcttttgttgggggcacactgggagagtgggtctgtccactgcctcccagcctcagagcagctcaccacaggagcaggagagtgaactcgtggctgtggctgtcaggcagggcctttcttgagagccagcgcaggcctgggctcctcagaggcttctggagtgagagatggcacctcagcctggcccatggaggcatgttcagggatcagcactactgtgcttcttggaggaggtgggacttgagctggacccatgggaggctggaaatttagatgagtgaaaaggaggaaaggcgaagtagagccacattacagagggcctcagagtccagataaagcagttaacatgtagtggctccaggagggaagcctgtctgtgcaccacatacccaggatgtttgtgggaaggaaggagatgtgcggaagggacccaggagacctgcaggaggcaagggctgcaacagaccccctctggaagtttacaggaggtgagtgtgagtcattagagacattcagttctgtaggaactaacgaactcccaagaggcagtaaacttaaaactcagcagtctcgataagtatggataaattaggcaaagacagattctgaggaatttctggtgaggggtgccaagtttggggagcagcccctggctccttgcaagctacccttcagtgctctgtgtgaccaagtccaagtcgatgcaggagggcaggcactgggtcagcaagccactcagtgaatgtgcaggtgaggccgttcataggcgcttgtgtgcctcccagcaggctgcctgccattgccagggctggccttcagcagggtgcgccaccatggcctgagtggttttctgctgaagtccgtgctgatttggccagtggataggcatcacctgggtgcaaaaccattgtctccaggtaggaatgacctcagctgtttgctccgtgtctcgctcagcctgtagatgtgtccctcatcccttcatgcctccctcttcactcctcttttactttctactcggggcttgcatgtttacaagagaggtgaacccaacagaaactagtataggccaaaaggaaaatgtgctgaagctcacacagcacagtcgtgtggaaaaggcagcagtgactgcttcatccagtgcccttcccacagccagtcagttgcgacccaaggggcttagggtaggagtgtttctccataggggaagagtaacagcctgcacccaccacacacccaaagccctacatcctgccacactgagacctcacttcatttgggcgggtccctcctgggttgcagtttccttcattgctcccctgtcccaaatactcaagtctctctcattaaaaataaagagcaggccaggtgcagtggctcacacctgtaatcccacactttgggaggccaaggcgggtggatcacttgagcccaggattcgagaccaacctgggcaacatgacaagatcctgtctctacaaaaaataacaaaaatcatctgggcatggaggcacacgcctgtagtcccagctacttgggaggctgaggtggaaggatcacctgagcccatgaggtggaggctacagtgagctgtgatcatgccactgcactccagcctgggtcaaagagtgagaccctgtctcaaaaaaaaaaaaaaataggccgggcacagtggctaatgcctataatcccagcactttgggaggccaaggcggacggatcacctgaggtcaggagttcgagaccagcctggccaacatggtgaaaccatctctactaaaaatacaaaaattagccgggcgtggtggcacgtgcctgtaatcccagctaccggggaggctgaggcaagagaattgctggaacctgggaggcagaaactgcagtgagctgagatcacgccactgcactccagcctggatgacagcgagactccatctcaaaaaaaaaaaaagaaaaagaaaaagaattaattaattaattaaataaagagcatgtctcccaccccaggcctaagttcttccctctatgagagactacttgcagaaacctgtgttctcactcttcccccttcctcacttcattcccacacatttcttttccatccctgcgcaccaaggtcaccttggtgctaaacaccagggacccatggtctcttcccctttgtgtcacaggctgtcctctgcctcttatcctcaccctttagctgctcctccactgtctcctctctcagaggtcaggattctggatctgtctctgtggaccctcagctctcctccaatcccaagtcccccgcatcctggtcgcatgtcagggtggtccagagatgcctgcctcccactgcccacacccaggggcccgccctcctttcctctaaccttcccacatactctggccccatggatccacggcagttcctgctggcccttctccattttgttccttatgctgcacccctctgctgccactccctgcgtccgtgactccagctcactcgtctctgtccttcacccaggccgcctgctcagggtttgtgcctctctgtgctcctgcagcacctgagtgtttattcacctctgaacctctgctttcccacctgagtacacgcagctcctggctgcagtgacttcatatcctgaggactggagctccgtggtgaacagatggctttctatgttctaatgagagggatacaagagttccacagttctagtctggaaaggaccaaacatttcttaaaagctaagtatgttgccggaaaaaaaagggagcagagctttccccaggaagcttggctctggtttagatttttcaggaaaagccggaatcaaattacagaataaataaaggcaaccatcccccttttaaaggtacaccagccttggtgcatctttgaagaaagcattctgtaaaccccaaccagaactaaactagtacgtcgaactcagattcattttcactaaaccacaagcaaatgtttccctaaaaatcacccagttaacaaagtccgcatatttaagccaaaacaatttaactgaacaaatgggccacacgttgatttccggtccctgctaataagtcagtctggaagttcacaggtgtgcccatcctgccttggctgctgaagtccaggtgtctagggctgactgatgcccattatgcctcccctcccccatctttgtcacaggatttgacgcaccagctctccaaatgaccctggccctcccatttgctgttcagcccaagtgcggagattggctatgaaccctgtaaacaggcctctgacccccagaggctgatggctggccaaggaaagctgagctgctgacgcagactgggaagcaagagcccacttccagcagcccaggctagctgtgtccaaatccatgactggggaggggttagagccttgagggacaaaattattctacctacctagggagactgcactggcccaacagctgggccccatctcatgggcccgcttcttcgccaggagagaagccactccggggtaggtactgccccacccaaacccagccatctggagtgacccagccctggttcccaggtgtgtggatgtgaattgtcccacccaacccactctacagtgagcaaacggaagccctctgggagagtggtcacagcctcccctgtacctctgaacagcctgccaggctccctactcttaggcttccactgtccaccagggaaagccctgagctgggagttggggagcccccaggcattgcccctgcccaggacacaattctcttttgggatcagggaaggctgtgagggctttctaggtctcaagatcaggagcttgaagatgcagcctgggaagtgggaaggtgagaccaggacataggccagcctaaagcaagagtcctgggcctgaaggctcctgggaaggtggtggggagggagcatgtgtcggtggcctcagggcagcagctgcctggtgaatgttcatggactggatgctctgggaagcgggttgggtggtgagcttctctcttcccctctgaagacgtcactggagtctgggggtggagctgcctggtctataaatcctggggccatcaggctagggtcctgcagctgcctgaaggagccatctcatccacagctcttccttggtgagtggggagccttccctaagggctaggacacctggaccaagtttcatcctgggcgtatggtgtgctgctcctcttccccattcccaggtgcctccacccctgaaccatgccagagaagtccccttttcctctcctctccccaacagctctaccatctattcttgtgcttgttgcccctggcatgggagggataaggggtagaagcacttgcccccatcaataccactcatccattccacatccccaactactatggaagagatacagcaggccacggagaaaagggcagaaggcctgcaactctggttccctagcactggtgctccaaacacgcctacattgagaactcccctgaccatccatctatcctcccatccattggcctgaattcaggtctctgttcccctccaactttcttccacttctggaaactccttgaaggaaagatggatggacctggacaagtgggagggccctcagagctggcaaggcaggtagcctctgtgccccaggctcagggagaaggctcgtcccctggagcatcatcccctgctgggccaggatcccccaggatctggacccctgtatgcttgggatgaggagcggtggcagagagggaagggcataaggagataccaaagctgcccctgagatgccagttttccaaagtggccctggaggaagtagggggatgtgggggtgaggtaagtctccttgaatgctgtaccctgtccattagagcagccatggccagctccaggcgaggcctcctgctcctgctgctgctgactgcccaccttggaccctcagaggctcagcactggtcccatggctggtaccctggaggaaagcgagccctcagctcagcccaggatccccagaatgcccttaggcccccaggtgggtgtctcccagcctcatggggaggaagaaagtgatggccgggggctcccccaccctcctggagcctgaggtcggggtagggaggacagcatcagttcccttctaaggaagggccctggacactgcagcaggcagcccagtccagactgcccatggcctcccaagtgatgccctggctcccctggacgacagcatgccctgggagggcaggaccacggcccagtggtcccttcacaggaagcgacacctggcacggacactgctggtgagtagggtgagaggtccccagcatcaagaccagccactggtcatcagaggccattgtggcttagggttgggtgctgggagggtggggagaatgaaacaccactgagatgccccctgccacagcacccccagccatttctcagtgcccctactgcacacagcagggtgctgtctgctatccttcctatttcccaggaggattctagacaatttacaaagcacttgggttaaagaccaaagtcactagtagactagaaggagataattgttctataagacagtggtggccatgggatcccacaggcatcctgacaagccaatgactgtcttgaggtggacagaccccaggccagtggaaagaggtgagggatgcaacctcactcaaacagacaacagggccaagaggaccaggtggtgactgacatgtgcactaggaacatctcagggactgcagagctccccaagaccatagcagaagacaggcgtggggaaatggtttgctactgttttgcaaatcaaacatttacagtgcatcaggagagcccggtaactaaagaagaaagtggttagttcctatgaggcaatgtcttaccgcctgatttgtgtgtatgtgctgaggtttctatgcgtcaggcttgtttagggtggacaagagggcatgcccaagggagctggagatccccacactagctggatcctcaggcttctacgggaggcggggggcgtcctgctgtgggaggccacatggggactgggggggacgagaggggagagaaccaggaagatggcagctcggcggttacgagaccagtgtcctgagacatgaccgccacctctccctccgcagaccgcagcccgagagccccgccccgccccgccatcctccaataaagtgtgaggttctccgaagctgttgcgtcgagttctgtccttcgtcccctccctgtcttccccgctgagacccttccctgcgtgggggctggagggacgcgggtccggccccgcgggcgggagtaactaagggatggccccgggccctggcgggaaggccgggccagagcctgggggcgggatgcggacgtccgcagggtcgccgcttcggttccagaggccacacggccgggcggggcgtgagggacagcccgaggactacaggtcccaaggttccccgcgccgcttccggggcacggtggcgtcccggcaccgcggccgcagtgaggagactcggccatgctacgcgcgctgagccgcctgggcgcggggaccccgtgcaggccccgggcccctctggtgctgccagcgcgcggccgcaagacccgccacgacccgctggccaaatccaagatcgagcgagtgaacatgccgcccgcggtggaccctgcggagttcttcgtgctgatggagcgttaccagcactaccgccagaccgtgcgcgccctcaggtgtgcggccggggggaggtggccgcccgcgcgcgctggtgacggtgggagtgggcggagagggtgctgattcctggcgcgtctgcacccaggatggagttcgtgtccgaggtgcagaggaaggtgcacgaggcccgagccggggttctggcggagcgcaaggccctgaaggacgccgccgagcaccgcgagctgatggcctggaaccaggcggagaaccggcggctgcacgagctgcggtgcgtggggcgggaggcggggcggggcggcgcggcctggccggcctgggagaagcccgggccccgctcagcctcggccctttgaccctcacaggatagcgaggctgcggcaggaggagcgggagcaggagcagcggcaggcgttggagcaggcccgcaaggccgaagaggtgcaggcctgggcgcagcgcaaggagcgggaagtgctgcagctgcaggtgggcaacgtctccggagggtgggactccagccggggacgcggcttgcggggcactgggaattctgggcaccgcgacgcgggcgctggctatgtgcagagacttacagttggcaggtccggatttggagaggagagtgccagtcaggcgcaaagacccggaggtgagcggagtaattggacagtgttcaggtacctagcaggtctgtgggagggaccctgcgttccacaaagaggttgtattttgcataacaggtgatgaagccatgaagggttaagtatttcaggctaggattagcaggtgtgcgacttaaaagcagggagaccacttaggagtaatgcagtgagaatggatgaggcttgatttaaagtatagaagggtggctgggagcggtggttcacgcctgtaatcccagtactatgggaggccgaagcgggcgtatcacttgaggtcgggagttcgagtccagcctggccaagccccgtctctcctaaaaatacaaaaattagccgggcgtggtgtgcgccagtaatcgcagctactcgggaggctgaggcatgagaatcgcttgaacccaggaggcagaggttgcagtgagccgagatggcgccactgcactccatcctgggcgacagtgagactccgtctcaaaataaataaataaataaataaataaagtaatggggggaaggatgagttagagtgattcagaggggaccactgagggacggatttcacctaccaggacgtgagattttcatagctggcactcggggctatggctgaagtgtctgagaaaagaggaacgtggaaaagcaacctgatatcactccactgggaggccagaggggctctcaaataggacctgggttccaggcatgcttccccagggagagcaggagctgctttctcagtggggtgagaggccagcaggctgggtgggctggctggcatgtgcccaaggctcctgttcagctgggcttttctctcccgataggaagaggtgaaaaacttcatcacccgagagaacctggaggcacgggtggaagcagcattggactcccggaagaactacaactgggccatcaccagagaggggctggtggtcaggccacaacgcagggactcctaggggcccagtaaggacagtgcccgccagggaccatgtatgtatcatggcggaagagttggccctgacctggaataaagcagttggtgttgcttatgaggaaggttcagccttatccagcacagccttcacgttttgccctctgctgtcaccacttggtcagaaacttccaaacgcagtgccctgttctgccggtgtgtacagcctcagcgcaccaggagaccctagagtggtttccatctcacagagaatcagacagggccacagccccctcaggcagccaggtcatctgagtatcattaagagtagtgatgggaagattacagtctgagggccaaacgtgcctgcttcctgtttttgtaaataaagttttgttggaacacagccacacccactcattgacttctttttactacagtggcaaaggtgagtagttgcaacagagaccatatgaatcccaaagactaaaatctttaactttttacaggaaaagtgtagtgatctctcatctggagctttaggactctagcctgtgtcacccaggacctgagccacaagctaaccattggccaggcgcctgcctctgctctatactgtgctttgctggccagagtctggtgtatccaagacccagaaggcaaagaggagaccccatttttttctgggttccacaaagaggttgtattttgccttacaggtaatgaagccatgaagaattaaatattctaggctaggattagcaggtgtgtgacttaaaagcagggaggccattaggagtgggtctctccacccatggcctcagtgacctacatttgccctggcattgccattgcccttgggccacccagcagatggctgctggcaggggagacatggttgaccaagattttatgaggttagtgtggcttagcaagcacttggaccaacctctatgggtactgggactacctgtgatgatgaagagagtatatagatccatagtccctgttcagatgcaggccctcaagcagtgtctgggatgagctggaggaatgtttctcaaccagagcagcttccgtttgctgccatgcacatgaactccagcttctctccatgtctcccacttctttgcagggaaggcctagggacccccaagaaatgaaaacctttttttttctttcttttttttttgagacagagtctcactatgttgcccaggctggagtgcagtggcacgatcttgctcactgcaagctctgcctcccgggttcacgccattctcctgcctcagcctcccaagtagctgggactacaggcgtctgccaacacgcctggctaattttttatatttttagtagagacgtagtttcactgtgttagtcaggatggtctcgatctcctgacctcgtgatc

SEQ ID NO: 20 - DNA, 2788 bp, H. sapiens
  CDS (187)...(2568)
ggagccgaggcggagccgctgtcctcgtccccagcggtcccgcccaacgcccgactctgtgacacaactaaaaaaaaacaaaggtatttatggaattccactgagtggtaatggatgatgcagttcaaataactaaggacacatgttcaaagagcataattaactttttaaaagaagctaataagcatggattcctggttcattcttgttctgctcggcagtggtctgatatgtgtcagtgccaacaatgctaccacagttgcaccttctgtaggaattacaagattaattaactcatcaacggcagaaccagttaaagaagaggccaaaacttcaaatccaacttcttcactaacttctctttctgtggcaccaacattcagcccaaatataactttgggacccacctatttaaccactgtcaattcttcagactctgacaatgggaccacaagaacagcaagcaccaattctataggcattacaatttcaccaaatggaacgtggcttccagataaccagttcatggatgccagaacagaaccctgggaggggaattccagcaccgcagcaaccactccagaaactttccctccttcagatgagacaccaattattgcggtgatggtggccctgtcctctctgctagtgatcgtgtttattatcatagttttgtacatgttaaggtttaagaaatacaagcaagctgggagccattccaattctttccgcttatccaacggccgcactgaagatgtggagccccagagtgtgccacttctggccagatccccaagcaccaacaggaaatacccacccctgcccgtggacaagctggaagaggaaattaaccggagaatggcagacgacaataagctcttcagggaggaattcaacgctctccctgcatgtcctatccaggccacctgtgaggctgcttccaaggaggaaaacaaggaaaaaaatcgatatgtaaacatcttgccttatgaccactctagagtccacctgacaccggttgaagaggttccagattctgattacatcaatgcttcattcatcaacggttaccaagaaaagaacaaattcattgctgcacaaggaccaaaagaagaaacggtgaatgatttctggcggatgatctgggaacaaaacacagccaccatcgtcatggttaccaacctgaaggagagaaaggagtgcaagtgcgcccagtactggccagaccaaggctgctggacctatgggaatattcgggcgtctgtagaggatgtgactgtcctggtggactacacagtacggaagttctgcatccagcaggtgggcgacatgaccaacagaaagccacagcgcctcatcactcagttccactttaccagctggccagactttggggtgccttttaccccgatcggcatgctcaagttcctcaagaaggtgaaggcctgtaaccctcagtatgcaggggccatcgtggtccactgcagtgcaggtgtagggcgtacaggtacctttgtcgtcattgatgccatgctggacatgatgcatacagaacggaaggtggacgtgtatggctttgtgagccggatccgggcacagcgctgccagatggtgcaaaccgatatgcagtatgtctccatataccaagcccttctggagcattatctctatggagatacagaactggaagtgacctctctagaaacccacctgcagaaaatttacaacaaaatcccagggaccagcaacaatggattagaggaggagtttaagaagttaacatcaatcaaaatccagaatgacaagatgcggactggaaaccttccagccaacatgaagaagaaccgtgttttacagatcattccatatgaattcaacagagtgatcattccagttaagcggggcgaagagaatacagactatgtgaacgcatcctttattgatggctaccggcagaaggactcctatatcgccagccagggccctcttctccacacaattgaggacttctggcgaatgatctgggagtggaaatcctgctctatcgtgatgctaacagaactggaggagagaggccaggagaagtgtgcccagtactggccatctgatggactggtgtcctatggagatattacagtggaactgaagaaggaggaggaatgtgagagctacaccgtccgagacctcctggtcaccaacaccagggagaataagagccggcagatccggcagttccacttccatggctggcctgaagtgggcatccccagtgacggaaagggcatgatcagcatcatcgccgccgtgcagaagcagcagcagcagtcagggaaccaccccatcaccgtgcactgcagcgccggggcaggaaggacggggaccttctgtgccctgagcaccgtcctggagcgtgtgaaagcagaggggattttggatgtcttccagactgtcaagagcctgcggctacagaggccacacatggtccagacactggaacagtatgagttctgctacgaggtggtgcaggagtatattgatgcattctcagattatgccaacttcaagtaagcggcaacaagggtccgtggacaggaggattgcctttaatattttgtaatattctgttttgttaatataccccaaattgtgtatatatcttataactgttttagaaattggtacataggcttctattacctattaggtggaaattttatatgtaaatgtgttagcactgatagtcctttttccaatgttttattggggaattaaatagtgtgatgtttgg

SEQ ID NO: 21 - DNA, 2565 bp, H. sapiens
  CDS (179)...(2560)
aattccgtggtaatggatgatgcagttcaaataactaaggacacatgttcaaagagcataattaactttttaaaagaagctagacttcttcagaagcttgccagtttttcaagctgatttctctcactggcaactcttcagagtgctgttcctactccaccctcccctggtgataagcatggattcctggttcattcttgttctgctcggcagtggtctgatatgtgtcagtgccaacaatgctaccacagttgcaccttctgtaggaatcacaagattaattaactcatcaacggcagaaccagttaaagaagaggccaaaacttcaaatccaacttcttcactaacttctctttctgtggcaccaacattcagcccaaatataactctgggacccacctatttaaccactgtcaattcttcagactctgacaatgggaccacaagaacagcaagcaccaattctataggcattacaatttcaccaaatggaacgtggcttccagataaccagttcacggatgccagaacagaaccctggccggggaattccagcaccgcagcaaccactccagaaactttccctccttcagatgagacaccaattattgcggtgatggtggccctgtcctctctgctagtgatcgtgtttattatcatagttttgtacatgttaaggtttaagaaatacaagcaagctgggagccattccaattctttccgcttatccaacggccgcactgaggatgtggagccccagagtgtgccacttctggccagatccccaagcaccaacaggaaatacccacccctgcccgtggacaagctggaagaggaaattaaccggagaatggcagacgacaataagctcttcagggaggaattcaacgctctccctgcatgtcctatccaggccacctgtgaggctgcttccaaggaggaaaacaaggaaaaaaatcgatatgtaaacatcttgccttatgaccactctagagtccacctgacaccggttgaaggggttccagattctgattacatcaatgcttcattcatcaacggttaccaagaaaagaacaaattcattgctgcacaaggaccaaaagaagaaacggtgaatgatttctggcggatgatctgggaacaaaacacagccaccatcgtcatggttaccaacctgaaggagagaaaggagtgcaagtgcgcccagtactggccagaccaaggctgctggacctatgggaatattcgggtgtctgtagaggatgtgactgtcctggtggactacacagtacggaagttctgcatccagcaggtgggcgacatgaccaacagaaagccacagcgcctcatcactcagttccactttaccagctggccagactttggggtgccttttaccccgatcggcatgctcaagttcctcaagaaggtgaaggcctgtaaccctcagtatgcaggggccatcgtggtccactgcagtgcaggtgtagggcgtacaggtacctttgtcgtcattgatgccatgctggacatgatgcatacagaacggaaggtggacgtgtatggctttgtgagccggatccgggcacagcgctgccagatggtgcaaaccgatatgcagtatgtcttcatataccaagcccttctggagcattatctctatggagatacagaactggaagtgacctctctagaaacccacctgcagaaaatttacaacaaaatcccagggaccagcaacaatggattagaggaggagtttaagaagttaacatcaatcaaaatccagaatgacaagatgcggactggaaaccttccagccaacatgaagaagaaccgtgttttacagatcattccatatgaattcaacagagtgatcattccagttaagcggggcgaagagaatacagactatgtgaacgcatcctttattgatggctaccggcagaaggactcctatatcgccagccagggccctcttctccacacaattgaggacttctggcgaatgatctgggagtggaaatcctgctctatcgtgatgctaacagaactggaggagagaggccaggagaagtgtgcccagtactggccatctgatggactggtgtcctatggagatattacagtggaactgaagaaggaggaggaatgtgagagctacaccgtccgagacctcctggtcaccaacaccagggagaataagagccggcagatccggcagttccacttccatggctggcctgaagtgggcatccccagtgacggaaagggcatgatcagcatcatcgccgccgtgcagaagcagcagcagcagtcagggaaccaccccatcaccgtgcactgcagcgccggggcaggaaggacggggaccttctgtgccctgagcaccgtcctggagcgtgtgaaagcagaggggattttggatgtcttccagactgtcaagagcctgcggctacagaggccacacatggtccagacactggaacagtatgagttctgctacaaggtggtgcaggagtatattgatgcattctcagattatgccaacttcaagtaagcggc

SEQ ID NO: 22 - DNA, 487 bp, H. sapiens
gatcctggcccgctgggcctgctacaaggtgcaacagaaggatgtctcagatggggatgtggctcgagccattaaccagaagctgggggacacgcctggtgtctcttcctccgacattgctgcacgagcctatggttgtggccgcacggagctggccatcaaggtgtgggtgcccagccctccacagacactctgatgtggttgttcagggcccccatgccagctccttctctctgtgccttccttctcacctcacagctgctggagtatgagccacgctcaggggagcaggtaccccttctcctaaagatgaagaggagcaaactggcactaagcaaggccatcgagagcggggacactgacctggtgttcacggtgttgctgcacctgaagaacgagccgaaccgaggagattttttcatgacccttcggaatcaagcccatggccctcagtttgtaccgacagttctggtaaagcatcaggatc

SEQ ID NO: 23 - DNA, 346 bp, H. sapiens
tttccacccgacagcttcgtgcacatgtgtcaggacctgcgtgtgctcaatgctgttcgggactatcacatcgggatcccgctcacctatagccaaaaatacagatataagcagctcaccatccaggtgctgctggacaggctcgtgttgcggagactttaccccctggccatccagatatgcgagtacttgcgccttcctgaagtacagggcgtcagcaggatcctggcccactgggcctgctacaaggtgcaacagaaggatgtctcagatgaggatgtggctcgagccattaacccagaagctgggggacacgcctggtgtctcttactccgacattgctgca

SEQ ID NO: 24 - DNA, 351 bp, H. sapiens
tgtcggccaaccagcgcctgtctctgaacagcaatgaacacgcgccttacagccaaggccgggtcgggagcgaggctgcggcgagtgcggcgctgacagagacgcgcgcgcgcgcgatcgcgctcggaccccggccgctgccgccatcactgtcgcccgcccagtcgcccctcagccgcttcccctcgccatggaggcgaggccgccgccgccgccgcggggctcggagccgcgggccgggcggcggccctgagggctagtggcggcccgaaacgccgccgcggagccgaggcggagccgctgtcctcgtccccagcggtcccgcccaacgcccgactctgtgacacaact

SEQ ID NO: 25 - DNA, 222 bp, H. sapiens
accaactaagaaaaaaagcacaaagttctcagagctctcgaggaaagtggttgtccccgtaccaccatgcactgtaaatatccctcccctctctccctggtcccctcccccatccccaccactgatatcatggggagtaataggaccagagcggtatctctggcaccacactagggactatcaggtaataaaagctttgactccctgagaaaaaaaaaaaaa

SEQ ID NO: 26 - DNA, 407 bp, H. sapiens
atgacctgtctctaaaaaagcccgattatttttaaaggcgatttagaaaggctgaattgatgagcaggaatacagaggtgtgatttgcctctcccacctctgtgctccattcttcactgtgatcattttctcattaggtttaagaaatacaagcaagctgggagccattccaattctttccgcttatccaacggccgcactgaggatgtggagccccagagtgtgccacttctggccagatccccaagcaccaacaggaaatacccacccctgcccgtggacaagctggaagaggaaattaaccggagaatggcagacgacaataagctcttcagggaggaattcaacgctctccctgcatgtcctatccaggccacctgtgaggctactaaaaaaaaaaaaaaaac

SEQ ID NO: 27 - DNA, 176001 bp, Homo sapiens
tcctgaagtacagggcgtcagcaggatcctggcccactgggcctgctacaaggcaaggatgtgggatggggtccaagggcatttagaggattccaggccctggtgaggtggaggaaatagaaagtgtagaactgcgctgggcacggtggctcatgcctgtaatcccaacactttgggaggctgaggcgggcgaatcacctgaggtcaggtattcgagactagcctggctaacatggtgaaaccccgtctctactaaaaatacaaaattagccgggcacggtggcgcatgcctgtaatcccagctacccgggaggctgaggcaggagaattgctttcacctgggaggcagaggttgcagtgagctgagattgcactgctgcactccagcctgggcgacagagcaagactctgtctcaaaaaaaaagaaagaagtggcgggggcggaggaggagggaaagagagagaaagaagaaagagagaaagaaagaaagaagaaggaagggagggaggaagggaactgaaggggtgggtcctaagggcttgcaggagtggagagtgaggaatggcatccagatgtttgtgacaccccgcatcccttgcaggtgcaacagaaggatgtctcagatgaggatgtggctcgagccattaaccagaagctgggggacacgcctggtgtctcttactccgacattgctgcacgagcctatggttgtggccgcacggagctggccatcaaggtgtgggtgcccagccctccacagacactctgatgtggttgttcagggcccccatgccagctccttctctctgtgccttccttctcacctcacagctgctggagtatgagccacgctcaggggagcaggtaccccttctcctaaagatgaagaggagcaaactggcactaagcaaggccatcgagagcggggacactgacctgggtgagggcaaggctggggggcccctgggctaagtgggagcctggctggaattcccactccaccttactctcctgcagtgttcacggtgttgctgcacctgaagaacgagctgaaccgaggagattttttcatgacccttcggaatcagcccatggccctcagtttgtaccgacaggtgtgtgtagtgggcagggttgtggtgtagccttctgagcacttgagttggccttgctgactgattgcctgcctgtggccccagttctgtaagcatcaggagctagagacgctgaaggacctttacaatcaggatgacaatcaccaggaattgggcagcttccacatccgagccagctatgctgcagaagaggtctgagatccatggggcgtgtggggcgtgtggggcatgtgggctggggctgttggtccggttccttcaggaatctaggccttcgtgttgggtgcacactccatctggtcctcactgtgagggagactctgacgtgaggccaggatgggggttagtgtcagaggagctagccatccctctaggacatcagagtggtgcacctagcaggcaaggctgaccctggcgaccctgggcacagggatgggggagaagactgtagcctgggtgaggagggcgagggtcctgcatgctgtgagttcaggccttccttcttgtctttatagcgtattgaggggcgagtagcagctctgcagacagccgccgatgccttctacaaggccaagaatgagtttgcagccaaggtttggcccacctttttccaagagcctcctcgtctcctggtcttccctcctggtccctcatccccatcatgcctcattatccgggtccccaggctacagaggatcaaatgcggctcctacggctgcagcggcgcctagaagacgagctggggggccagttcctagacctgtctctacatgacacagttaccaccctcattcttggcggtcacaacaagcgtgcagagcagctggcacgtgacttccgcatccctgacaagaggtaggtgagggcccaggctgcatgtgggtcccaggaccacctgcctctcctgcaacacctccaagcccagctttcctgcaggctctggtggctgaagctgactgccctggcagatttggaagattgggaagagctagagaagttttccaagagcaagaaatcacccattggctacctggtgaggcagggtcctccctccagcccacttccagtgagggtagtcttcgggagagagggctaggcagggagacagataggatggcccgttcatgctcctgttcagctgcccgcatagttagcgagtgcttcctgtatacacatttgtgggcaggcatcatctgctgtgttgggtgcactggaggatgggtccaagtttgcctgcagatgttacggggagagagaatgagctgctttccccagggagggccacagggggcactatgtgctagagggaaagtcttgtctgaggagggtggagggggcacagggagggtgcatatgggaggcagtggagatactgagggctgttttctgtggtgggtagttcagaggtgtatagggcaggtttgagaatgtcaatcacaagagaacacaggaaatgtgagggctggtggcaggaacgcctgttgcaaggggtaatggtgggtggtagagcagaagcgtggaaataattggtctcaagtctctgacagagctttggtttaggtgatttctgccctaagaatgttgagatcacaactgtctgtgcatgggggttgggggattatatgtactgacgggtgtatacatatagaatatatatggacgatgtatgcattgcgcctctgctcgtaagagagaggacaggagggctgtgcattaccttctccctccacccgcttcctctcctccaagccttttgtggagatctgcatgaaacaacataacaaatacgaagccaagaagtatgcttcccgcgtgggtcccgagcagaaggtcaaggctttgcttcttgttgggtgcgtcaactgagggcctgtgggtgctgggtggctgagctgtgggctggtgagaggcagggtttgtgcccttgagcagccccaacaccacctcctctcttgctcaaaccacagcgatgtggctcaggctgcagatgtggccatcgaacaccggaatgaggctgagctgagcctcgtattgtcccactgcacgggagccacagatggggccacagctgacaagattcaacgggccagggcacaagcccagaagaagtgaggagtccatcctgtacatctcaagcaaggggttcctcccctagcacctgggcttggcagaagggccatagttcatccagctcctcccctagagcaatgctgaggagcgggggcatggtagcagggctgtctggttttaaataaagttggaacacttcacagtgcttgtcttacacagtccagcctaagcaaaggcaagctcaagacaggatcctccagacaccacagcaaaactccatgtgttccgttgtgttgggaccggaggtgggggcttctccagccatactcgcaagaaacgtgtcctctccacagttaccaaggaaagctttctctatctcacagctcctaggaagattatagggagagatggcacaaaacttaagcaccagctcaccaagaacatactgtaaagcattctgtgtgtgtgcgtgtaaacacgcaagaaccacgctaaacacttttgctgcctgtacttcctttattcctcgtgacagccctgtgaggtaacatcaccccactttacagaaaggagattgaggaccagggagttcgataataacaaatatgtggcaaaacagggatttgaaaccccgggccaagtgcaagctggaactggaatcgggccctctgtgagaagggagcctgaggcaaggccccaatttgcactgcagtggtgattggaggactaatgagaagtgtgtggcctgcgggccataggggtcagggggtggtggcctttggaactcttgcccactgaactgtggtgagcaattccaagttgtctctgggccaaatagagaaggaggatggaagatttcaattctgccaaaaagaaccatgaacaccagacccgcaatcagtaggagtacccgcggggccctctgctctctctatctagccttccgttggcactccagtgcaccccctctgctctccctgtctagccctccgttggcactccagtgcaccccctctgctctccctgtctagccctccgttggcactccagtgcaccccctctgctctccctatctagccttcccttggcactccagtgcaccttggcttcatgcccagggccccacccaacactgagggcattgccttttcctttgtcgcccccactttgtctacaaggaggaaaccacagccagagggagtgcaggcctcactggagcttcaggcctctccctatttaacacccctagggccgaccatgcttttagaaagacagtgagagactcagggcctgagaaggtatttctttttttccttttcctacctgacttgtaaatgaaagtttgtgaaagtccttcaaggagatataagtcaaatggtaaaataactatcatgctcgccattcattatgtgggtcaagaatttggacaggttgtaacagggatggtttgtgtctgtttcatagtgtctgaggcatcagctggaagactaaaaggttgatagctaggggctgaaatcatgtgaaagcttgctaactcacacacttggtgagtgacgctggttcttcactgggaccttagctggggtggtctgccagaacacctgcaacatggtggctgggtcccaaggacaagcatcccaagagggtgccaggtagaatctggactgccttcctaacctagatttggaagttacgtggtgtcacatctgctagagtatttgtcacagcagtaatacaggcccaccccaccaatttcaaggggaaatagactccacctcttttttttttttttttttttgcgtggtagagatggggtctcgggggtctccttatgttgcccaagctggttttaaactcctgagctcaagcagtcctccctcctcagcatctcaaagtgctggggttacagcatgaaccactgaacctggcctggactccacctcctgatagggagtagcaaagttctggaaatactgtggctaggttttggaatcacaatctggcacagcccatcagctttcccttttggaatcagcagacaagaggaaaggaaataatccccaatgctgggctcatcattctgggcttttttttttttttttttttttttttttttgtccccagtcttggccccacaattcctcactgccctggtagctctttgatgcctttaaaaaatgttttcccagcttttcgagttctcaatgaaaaaggattgctatcaaacaacccagttttcctctctggaaagggaggcttgaccagtgcttttagaatgtacacaatacaaaacccacatctccaaagtaacatacagtatatttactcataggctatgtaaacaaacactgtacatatgaagttttagaaatatgtgagaaataacttttaactgatgacaaatgtatatcaacagtgatttcaactttataaaaggtgtgtgtgcatgtagagaagcattggaattgtctatggggagagttgctttaaaaaggcagttttgtatacttttttgtaaagttaatcactgatttgccccccacctccacagtttattataaaaactttcaaacatacagccaggtagaaataattttacagtgaacatttgtgtaactaccactggattctaccattagcatcttactatatcacacatctgttcatctatccattcctctatgtcaatccatcgtatttttcatatatttcaaagtaagttgcagacatcagtacacctccccctaaatacttcagtatgcatttcaataactagagttcatttttggtttgcaattttttttttcttttcaggcaaaatctacatacattgcaatccacagatcttaaatgtaattttctaagttttgacagatgtataagcctatgaattgtgacatttaaaaaccagaactgggattttcttttttcaaatccttgcttactcaattgaaattagtgtgagatgccttctgccctgagcagtttgtacagcaggcctatgcctacatgggtgggcagggccaagtttcgtccaatgtatgacgctaggattggggctaggaactaggactgtgtagctggaggcaaagaatctgggaacatttcttcttgtatcagtggtagccagtgcagggagaatcagggcaaaggctgggcgcagtggctcatgcctgtaattccagcactttgggaggcttaggtgggtggatcacctggggtcaggagtttgagaccagcctggccaacatggtgaaaccctgtctctagtaaaaatacaaaaaaattagctgggggtggtggcgggtcctgtaatcccagctacttgggaggctgaggcaggagaatcgcttgattgcttgaacccaggaggtggaggttgcagtgagctgaaatggcgccattgcactccagcctgggcaatgagtgaaactctgtcttaaaaatatatatatatatatcgagcaaaggctcctacaactcaccttctcagggtaaggggctgtatgtccagtctcttagatacaaagttccagtgaaagactcttggggttggccaggcgcagtggttcacccctgtaatcccagcattttgggaggctgaggcaggcagatcgcctgaggtcaggagttcaagaccagcctggccaacatggtgaaaccctgtctctactaaaaatacaaaattagccaggcgtggtggcgcatgcctgtaatcccagctactcgggaggctgaggcaggagaatcgcttgaacccgggaggcagaggttgcagtgagccgagatcgtgccattgcactcaagcctgggcaacaagagcaaaaactccgtctcaaaaaaaagaaaaaaaaaactcgggtttgaacagtgtggcctgcaaagggacttggctctcatttacttcacctttctatcttattgccttgctttattttcatttcagcatttaggaaattttcttgttcttttgtttattgtctgtgttcctatccagaatgtaagctcctgagagcagaggcctcttctgtcctcttctgtcttattccctgctgtgtccagcacatggtctgcactcaataagtatttgttgcgagaatgactcattgttccatttactagaaggggaaaggaggccccgagaggggaaatgacttgcctaaagaaacaggagtcctttccccccatcctccagctctcctgatcctctcctttgctcataaaccctgtgactgttggggcacctgtggggtggctgcgaaatgcctacctgtaggtatgtgctcctgtgggttgggactaatgcaggactaggagtaggagggctctgcagtcccccatttgggtaggcttgggcacaggaaactgcctcctttcccttcctcagttctcttctcttccaggataaccctttactctgtgatgatgatgggcgagggagctcaggacactctgggagccaagtaggatggagggctgggcaggtctctacaggcaggcagctgaggagggggctctgtcttcttccaatggaaacagcatctgtgtggttgctgagctgaaccctccttcccagggtctccagggtctgtagttctccttggtctgtagttctgtcacccctgtgcacaccccacaaatgctttgaccatagtgcagctgtctcatggggagagaaagaactttcatttcctgagaatgggttacttgccaagctgaacatgcctaattctcaatacagccctgggaagttccaggaagagttgcagagggaggctcaggtcacccagcacatggtggggctggaaaccccgggctctttgactaccacgcccaacaacaatttttccaagtgtggtcatatccaaaaggggtccttcagataatctcaaagatgaacacttactgcaatcactatttcagttatattaaaaatataagtagcatgtcaaccccttctagggtaatacaaataaaaagtaaaaaaaaactaatcaacaaaaagaaacatattaagaaataatagtgtaaattagatataaggcaaaagtaagctggtggggtttggttctagagcatagggctgctatcccagctactgaggtacctcctgcgtttgcagtcattacttgttaggggttttcacactttgacttcctgcttttcacttttccattcggtgttgcgggatagattgagtttggacttaaggggatatgtgaatgttgggcgtggggaaggatccaccctcactggggtctgagcgttaggagagtaggcgtgtggactctgggcctttgggctggagtgtctattggtcagaggtgtcgggttcggccatttcaccctcacctctaggctggccctgctgagagggagagagagtcacaactcccactcaaggagagacttccctgctggggaggggacggcctgaggcccgccccacccatattcccaggccctggctctggttagcatggactaacttattccacaatacggaggagtggggcacagagtccctaactggcgccccaacagaaggcggtggtggggaccggagatggtaggactggagatggtaggggctgctgatgtgagcccacaatacggaggagtggggcacagagtccctaactggcgccccaacagaaggcggtggtggggaccggagatggtaggactggagatggtgggggctgctgggagccccttttgcgccgcagtgtttcctgccatgaagagttgccgccggtcacaacccttccccgggggcgccccgaatgtgggactccttccggcctggggtgcgtgagggggactcaggggttgcccggtctggaggagagactcgccgccacctaccccgggaaccgcagactctgggtctgggataaagcgtcccctacccgcaagctcggtttgtgcgctactgtgcaatctgtcttttgcctgcagacgcccagccgctcgccctgcgcgggtctcggaatgtccaggggtccctactggggatcacaacccggcgaaatgtcgcatttgccaccacctatctcgactgcgtaatcggctttcagccgcagacgctcaggtcctgcagcacccgcggggatccgtgtaggaacctgctgccgctggatggactgagcgattgcttcgcgggtgtcacgcaccagacgccgtgccgggagcgccgggaagggggtacgcgccccaaccccggccgggggagggcgcactctggctcctctctgcgttttgagcctcccctcccccgccaggcgtatcgcaaaaggcacctccatcgcagagcaccatgtgttgtgcttctactcagctcggtggcgagcggggccccagcatgcgcatctggaaagcgggggagattaccctggagctcgggtggggacggcgtgggctgacttgatataagacgacacccacggagccagatccgttctagggacttggcaggttcctctccctccccagtgagatccgtcgttctttgcagcaattaggggagggaaaaaaaagacccacagtatcacgtttggagagggttaggaagatggctctcgagttgcaggccgccctggtggctagacattggtgtagtttgtgcctggcctcggtttcctgatctgtaaactgggaagaaggcccaagtcatgaggcctgtgactgtagaatggctgaaggcactggtgcactcgcagccggtccttccggggtccagcttcccgaaggactgggcagccccggggcgaacccctctggagctaccaggagaacgtgcgaccgggttcggcgccccagccggcaagtgagcgcccagcggagcgcaagggcggggcccgcgcgggccggagacgcccgttcgctgtcggccaaccagcgcctgtctctgaacagccaatgaacacgcgtcttacagccaaggccgggtcgggagcgaggctgcggcgagtgcggcgctgacagagacgcgcgcgcgcgcgatcgcgctcggaccccggccgctgccgccatcactgtcgcccgcccagtcgcccctcagccgcttcccctcgccatggaggcgaggccgccgccgccgccgcggggctcggagccgcgggccgggcggcggccctgagggctagtggcggcccgaaacgccgccgcggagccgaggcggagccgctgtcctcgtccccagcggtcccgcccaacgcccgactctgtgagtgttcgcggccgctgcgcccgggtgggctccggaagggggagcggctcccgggggcggtgggaggggtcccgggccacagcccagagcccggagcccgaagccctaagccatcttttccgggtagaagcctgcgggcgcctgcaggttgattgtgcatccttgcgggtccgtcgcggggagggggtccccggaaacgtgccggcccgagtgccgacccctcgcgactgcccaggaactttgcatgcgtccttctgggaccaggccagggcactgccagagttgattctcagagaagaaacttagaacggcgagaacagaatttgctcaggtccatttaatgggaggaaagaggaaaactcttggcatgagaaaatttgcttttgcagtgaccaacttttctttcccttcaagtccacctccctcggtcccccggcccgtctcccaggcccctctccttgccgccctctcccaactgttgaggctgtttaagaagggaaataagggctgagagctgcccagaattcagaataggccaattgagaacgcaggtcccctccctttttactttcggtaaataaaaaattttttttgaaaaaattagttactaattatatctcctgaagattaaaaaaaaaaaatagcagagcagagtcctgtcttgagggtttcgtttttatttttgagatcactgatgatatttgtaagacaggaaaagaagaatgtgcaaatccaccctctgcagggtgaacgccatcagaagcctttgctcaggagagggattccggctctagaaccagtccacatcaccctggagatggcttcgtttgccacctgctagctgtgcaggcagcctgagaaacagaagatggtgggcgagaggaggactgactaggaaagggcgaacatcttcctgcctggccactcctttcagaaacagatctgatgctgtcacttgtttacttaaaaactccctcgcttttctttttcccatgggatgaatgaagcctaaaatgccttatcaggtcatacaaagcccttgacaatcttgcctcaatttactcctttacttttagcctaatcggatcctccaattctccttcccctcatcccgcttgctggctagtattcagagctgcttgactgccccctcacatgttgggatgtttttgttttatgtgatcctctttcttccccacctttacctgccaagctccactttttcttttaaagttcttctcatttgagaagcttcttgcgggcaggagctgtgtcttgcccacctttctatctcccgtggtgggagaatcctccaagttgtcttgtagattctttccaatctcttctctcttatgcctaggctctgtttatttcccggtatccacttcccaagagattttttcgtgttttgaaggcctgcttggagtacatgcccaggacttttagtatttctgattcccggcttccccatgtccatcccacccagcccccataagcagtcagcaggtgggaactggtaggtcccatatcccactggcctccaaaaaactgtctctgaaagactaaaagcccttcagtctcttttcacctctgcctgctcaaagtgacctggctgataccgtgcattgtaaggcatggtgggatcccggggcctgttctctgtttagccacttaacatctgggtgaaatacagaaccagaaaaaccacccctctgacttcagtacattcatgtgtcttccctttgccaggtgaattgcttgggatacaaaagtgaggaagtcagtccttaacctttgaggaactcagagtctaatgtaggacaggtggatataaatacatcacaggtgctataagattgtgataataataatagctattttttatttgccttgtgacaagctatgtaatgttttccatgaattccctcagtcttttcaacagtcataaaagggcttattcctactctacagggttggaaactgaggccaaacagtgggcaaatgagggaatagtcaagatttgaattttggccgtgtatttgcagagcctctgccaggctgtgtagggagcatcccctgcctgggtgatttgggaaagctttcctgggacgggggggccttcggatcatgaaggatgcataggagtttgcgcgtggtggactgcacacataggcaagagggagcagcacaagcaaacttggtggtggaaggaatccactgtccttggggaggagggaagaggttaatcatagctggatcaggtaaggacaatggagagctactagaggatttaaaggaggtcagggacttgggctgaaagaattttggaaagatcatttgggggcaatatagggccaaatgcagatgcccctgcaatataggaggcactggttgggtctgacagaggtagagtcacagcctcttagacccagaggaaggtgtagagagaatcctgctcaattttgggaaaagataattaatgcagatgagagaaaaattcaaaagttctagcaatacaaaagagtatatagagaaaaatgtccctcctaccctggccccaagtctcctgtctccctaacctcctccccagagatggctgaagttttcagtttatatggccttccatagacactgttgctttataaatatgtgcctgcttatccatactcctcccaccatgggacgtaccactcacaccttactgggtttttttacttaacatatttaggaaatcattctattatcaacatatatagagagttatttgttctttctgttgacatgcttttacttatttagttgtatggctgtactgtaacatctttgggttaaatatttgtttccaggttcttctcttacagcaatgaatgtccttgtacatactgtgttatgtgctcatttgcaaagttatctgaacaatatgcttttagaagtagaattactgggtcaagggatatgtctgcatttttgatttgcagacatggagccaaactgccacccgtttctggggggttgtaccaatttatcctctcccccaaagtgtatagctggatagatgatctttggagaattcaggaggatcaactacgatgctttttcagctattatatgcctacttttcctccacaaatcctcccccaccctatgcgattctagccagtttctttgaatttacagagggagatgttgaggctcagaaggataaaagtaacttgtgcaggatgatcagtgcgggtggtggtgggtgttttgttttgtatttttgcacccctcatgtttgtatttgccagcacctttcattggaggtgctcagtgtcagtttgtaaacattattgcattatttttctccattttcacatggaaaaaaatgagatgcaggggaagtttgagttatgagagggaaactggccaaatatagaatcttgtcattttacttccagtgcaataataaatgtttccaaatgacaaagctgaagagatgttttttgtttgtttgtttgtttgtttgttttttgagatggagttttgctcttgttgcccaggctggaatgcaatggcgctatcttggctcacgcaacttttgcctcctgggttcaagcgattctcctgcctcagcctcccgagtagctgggattacaggcatgtgtcactgtacctggctaattttgtatttttagtaaagacggggtttctccatgttggtaaggctggtcttgaactcctgacctcaggtgatccgctggtcttggcctcccaaagtcctgggattacaagcatgagccaccgtgcccggtgaagaaatggttttttagtgagtctgagtacaacaaaaatagcaataatataacactaacttaataaaactgaacagcaggcccaaaaatagcccaacattaaaatttattttaatgtattctctatggaaaagagaatccattaaatgtaaaactatttattttactctaaattcacatccatttgtgtcagtgtacaagacataatttttatagtagcagtcagtacatatagaatatgatttttgaattcttcaatagcataaaatattttatatttactcatttaagtatttgttcatttaaaatcacaggctgggtgcggtggctcacgcctgtaatcccagcactttgggaggctgaggcaggtggatcatgaggtcaagagatcaagaccatcctggccaacatggtgaaaccccatctctactaaaaatacaaaaattagctgggtgtggtggcgcgtgcctgtaatcccagctactcgggaggctgaggcatgagaatcacttgaacccaggaggcggaagttgcagtgagccaagatcttgccactgtactccagcctggcgacagagcgagactccgtctcaaaaaaaagaaaaaaaaaatcacagtatagtattccatgcatcgacagctgtagttttttttaaatttgtttttgtttttttgagacagggtctcactctgccaccctggctggagtgcagtggcatgatcacagctcactgcagccttgacctcctgggctaaatgatcttcccatctcagccacctgaatagctgggactgcacaggtctgtgccaccacgaccagctaatttttttattttttgtagagacatttttatgttgcccaggctagtcttgaactcctggactcaagtgatccacccgccttggcctcccaaagtgctgggattacaggtgtgagccaccactctcagccaacagctgtagttggtgcaatcctttttattcttttatttttttctacctttttgctattataaatggtacttttataccccttgttcaaatacttcttttggattatttccttggactcttactcccaacctgggctcaccaagtcagaggatacagtttcggtgcctaattgcaatctggaaaggttgaactagtttccagcactatcagcaatttatggggccatttcttgacaacccatctagtgctattacaaagaaatgtaatgataccttgaattaggtttaatttacattgctttggaaaaagagaccagtagctgatttagattttttgaaagaagtacagtgctgtgatatagattatctccaagatttatgtaactgaagccaacttgtggttgaagaaagatttggttgatgagattgaaatattgtggaagtttagaataggatcatagcagtataaaatataaggctagatgctgttcagttggaaataccaggcattgtgccggaagctggggacaccccagagtaacatagatgtgatgtctgtcctcatgacacttttaggttagtgcagtagacagacattaaaatcacctatggtaattatagatgtgatgaaaggggaagaatagggtgtcgggagtgtcagagaagttcagcagctaaacaacatttgcagttaaacatttgtgaaggccctgagctgagaagggatttggtagctcagggcagcgcttcgctaacttgaatgtgctcatgaaccatctgggaatcttgttaaaatgccaagtcctgaatcagtaggtttggggtgggacttgggattctgtgttactaaccagctcctgggtgaggcagatgctgctggtgggtggatcacacttggtgtagcaaggcctaattgagagcttggtgagcacctaaaactggctgaccatggtgagcaggaaggggcaggtggcttgcagtgacagagtaattctctgcctaggctgcactttagattcacctggggaacttagaaaaatcagggttgcaaatgccccacccgcagccattttaatttaattggtctcagttggggcctgagaatgtgtatacagtcatgcacagtataacgatgtttccatcaaggagagactgcatatgccacagtggtcccataagattataatccataattttactataccttttctatttttagatatgtttaaatacacaaatactcactgtgttagttacttacagtattcagtacagtaacatgctgtacaggtttgtagcctaggagcagtaggctatacaatatagcctagatacgtagcaagctgtaccatctcattttgtgtaagtaccttttatgatgtttgcagaattatgaaatcacatcaggactcatcctcagaatgtgttccattgttaagtgatgcatacctgtatatatattttaactccccaggtgattctaatgtgtagccaggcttgagaactagagactaaggacagtgttgagactagagaatggcaaggagcagagttgagggtcctgtatggcatgcaaggattttggactctatcctgaaggcagagctaaatctttgaaggatttttaagcaggagagtgaactgatctgatttgcaattgttaaaaagttcactgtggctgtagtccagagcagtagttttcaaattgaggtagataagatgatccaggggaactggaagaaaatttagaactttttattgtttttatctaaaagataagataaaacatttaatttaggaattgtctctggcatcttcttgggtctataggtcaaacagttaatgtgttaactgtagaactttgggtgtcctgaaggaagagactgaattctgcagtgagcagagacatatttatacatttgttctccatgtattgcaacatgttgttaacagtttatattaaccagttctcattgaactagcctttacaaaatggacatgcagagaaaccagtgatcaaagaaaatactaataatacaagcacaagcaaacaagttgtcagagctgacacttgtccaactcctgtgatgaattcttggtgagctattcaaataagtcagctcttactaaattggaaagtatcaggaaatttataagaaacatgaactttcgtgctctgtcattaataggaatcttgctttaagattccttttaatcgtatgtagaacccagctgcacggtggctcacacccataatcccactgttttgggagcctgaggtgcaggaggccaggagctcaagacaaacctgggcaacatagcgagaccccatctctaccaaaaataaaaaattagccgtgtggtgtcacgtgcctgtagtcccacttacttgggaggctgaggcagaggattgcttgaacccaggagttcaaggctgcattgagccatgattgcaccactgtactccagcctgggggacagagggagactctgtgtctcaaaaaaaaaaagaggaggaccgggcatagtgggtcacacctgtaatcccagcactttgggaggtcagggtgggtggatcacaaggtcaagagatcgagaccatcctggccaacacagtgaaaccccatctctactaaaaatacaagaattcgccgggcgtggtggcgtgtgcctctgggtaatttcagctactcgggaggctgaggcaggagaatcctctgagcccaggaggcggagtttgcagtgagccgagatctcgccactgcactcaagcctgggtgacagagcaagactctgtctccaaaaaaaaaaaagtatgtaaaaccttgagatattaaataataaaatatgaggctgtcaccagtatgaagacatttgaaaaccaaaaatttggaacataaaaagaacctctacattttttttgcagtgatgtttaaagataaaggatattccatcagatgctttacaaaattttgctaacttcaattattaaaatttatattttgagggttttttgcttttaagagacagggtctcactctgttgcccaggctggagtacagtggcacaatgatagctcactgcagcattgaactcctgggctcaagcgatcttcccaccttggccttccaaagctctgggactacacatgtgaaccaccatgcctggccagtttttaagtttattgttcttataaaagacaaaatggggccgggtgcagtggctcatgcatgtaatcccagcactttgggaggccgaagtggacggatcacttgaggtcaggagtttgaaaccagcctggccaacatggcaaaaccctgtctctactaaaaacacagaaattagccaggtatggtgggcacacctgtagtcccagctactcgggaggctgaggcaggagaatcgcttgaacctgggaggcggagattgcagtgagctgaggttgcgccgctgtactccagcctgggagacagagcgagactgtttcaggggaaaaaaagaaaaaagacaaaaaaacacatacccttggcagattcttcctgccccacccccaaaaggcccacttaaacaaaaaatggactgatgtactacatggaaaataattttgtcaggaaatcaaaatactgttggaagatgtatagaaaacattgctgaatatgtgaacaaacaatattagaacaaattttgcagtgtgggaagtttggtatacggttataaaagtacagaagcttctagcatgtctcagtatcgctagatactcttttttttcttttctttctttctttctttttttttttttgagacagttttgttctgtcacccaggctggagtgcagtggcaccatcatggttcactgcagcattgacctcccagtctcaagtgatcatcctacctcagcctctcaagtagccaggaccacaggcatgcaccaccatacctattttttttattttttatttttaggagagatgaggtctcactatgtttcccaggctggccttgaactcctggctcaagcaatccacctgccaaaagaccttccaaagtgctgggattacaggcatgagccaccgtgccaactgtgccaggcctagattaccttttaatagttacatccaagaataaggaccacttcttttgtgagctactggaagaaagttgtactggagaagacatatttttaatagtaaatgattgccttcataagaacattactatatggaataatagactgaatgtaaattaatggaacagctgctttgactgaacaaaagaatgaaattcattcattacttctctatgggcaggctgttgagtccacttatttgttaattatcttgtggtagagttgttgatgagttttgcatttttcttttttaaaaaaatgccaactttttgttatggtaagtggctacagtttgagtaatcctaatatgaaatccaaaaggcttccaaatccaacactttttttttttttttttttttttgagacaggttctcactctgtatgtagcccaggctggagcgcagtggcatgatcatggctcattgcagccttgacctcctgggctcgggtgatcctcccacctcagcctcctgagtagctgggactacaggcatgcaccaccatgcccagctaattttgcaaccagtaggaataatgcaaatagtacaaaatctgaaaaatacctaaatctgaaacacttctggtcccaagcatttcagataaggaatactcaacctgaacctagcaaatatcatttgaaaaaataatatcttaatctgtctcttcaagtaaaagtattatttaaatagtgagtgaaaaaggaactacttcttttcttagaaagaaatgtgcaggccgggcgcggtggctcacgcctgtaatcccagcactttgggaggccgaggcgggcggatcacgaggtcaggagatcgagaccatcctggctaacacggtgaaaccccgtctccactaaaaatacaaaaaattagccgggcgtggtggcgggcgcctgtagtcccagctactcgggaggctgaggcaggagaatggcgtgaacccgggaggcggagcttgcagtgagccgagatcgcgccactgcactccagcctgggcgacagagcgagactccgtctcaaaaaaaaaaaaaaaaaaaaaaaaaaagaaagaaatgtgcaatggtagagcgttttcctcgttggaattttttttacatgtaatcattataagctataacttacatattataaaattctcctttttaaaatgtacagttctgtggttttttgtatatgcatagagttgtgcagcttttgccactgtctagtttaagaacatttcatcaccccaaaagagaccctgcacccattagcctcacttcccattctctcctccctccagtccctggcaactactaatcttcctgtttctttggatttgcctattctggacatttcatataaatgaaatcatacaatatgtgaccttttgtagctggcttcttttacttagcataatgtttctggggttcattcatgttgtatcatgtatcagtacttcattccttcttatggctgaataataatccattatattgatatacgacatttggctaactggttcatcaattgatgaacatttatttgtttctactttttggctttatgaataatgctgctgtgaacattcatgtataaatttttgtgtagtcataggttttaatttctcttgggtatatatatatacctaggagtaggattgctgggttaaacggtgactaactttgaggggctgtcaaactgttttgtaaagtgactacccattcccagtagcaactcacaaaggttccagcagcaatacaataggggtccagtttctcccagcaatgcttaggggtcccaatgtctcccatctttgccaacatttgttactctctttttgattatagccatcttagtgggtgtgaagttgtatctcattgtggtttttatttgcatttccatgatgatttatgatgtgcatcttttcatgtgctgttggccgtttatgtatgttctttggggaaatgtctgttcagatacttggctcattttaaaatttagttattgctctttttattattaagttacttatatatttttagatataagtcccatatcagatatacgatctgtaaatattttttcccatctgtgggttgtgtgttcagctgtttgcgtggacatatccttttgggtagatctaggagtggaactgctgagtcaaatggtaactctctggttttttttgttttttttgtttttttttttttttgagacggagtctcgctctgtcgcccaggctggagtgcagtgacacgattttggctcactgcaagctctgcctcccaggttcatgccattctcctgcctcagcctcccgagtagctgggactacaggcgccccccaccacatccagctaattttttgtatttttagtagagatgggatttcacagtgttagccaggatggtctcgacctcgtgatccgcccgcctcggcctcccaaagtgctgggattacaggcacaagccactgcgcccggtttgaggaaccactgactttgttgaggaacagaaagaacgcctgcacctttttacaatcccagcagcagtgtatgagtgtatcagtttctccatatccttgtcaacacttgttgttttttttaactgtagccatcctagtaggtgtaaagtggtattgcattatgttttaatttgcatttccttaatgactcatgatctgactgtgattttgttgcatctataaaattctcataatttgacacatgaaaaccttagaaacaattttgtaacctaataaaaatctccaaatgtgtttctaaaaacatttccagatgatctaatgaagtaaagaatctaggcattggtcaccagtggctgttaaaaccattagggaactttataataaagggatcagtgtgacaatcttctgatcaatcataacatctctaaaattgggacaaccaaatcttatattctttctatgtgatactaggaagaacatatcattcatgaaatagtcttgcttgccccaacaaacagagtcaaaccttcctctgattagtgtagatctgattactggtttataggatataattggcaaatttagaatgtgaaaaatattataggacaaatgaacccatttacttcaaatgaatggcaagaaaaaaaaagtacacgaactgctacagattaaaaaagacttgaggctgggcgtggtggcccacgcctgtaatcccagcactttgggaggccaaggtgggtggatcatgaggtcaggagttcgagaacagcctgaccaacatggtgaaaccccgtctctactaaaaatacaaaaattagctgggcgtggtggcacgcacctataatcccagctactcgggaggctgaggcaggagaattgcttgaacccaggaggcggaggttgcagtgagatcatgccaccacactccagtgtgggcgacagagcaagactctgtcttggaaaaaataaaaaagacttgaatgaaacatattaattgaacataagtatagatcttgtttagatcctgtttcatgcaaaccaactgtaaaaagttatttatgagcccattgggagtaatttaaatttgaaaaccacttgtatattagatgatttttaaacaattttaattttttaaaggttattatagtagtatggttacattaaaaagaaagactcctttctcttacagataggtactgaagtattttggatgaaatgatgttgatatctggaatttgctttaaaataattcagcatgtttggaggattacagacgagacaagaattgccatacgttgataattattgaagctggataataggtatataagggtttattatagtattttctctactgttgtatatgtttgagaattcccatagtaaaaaattaaaagagaaaccactgtaagggaagagttttagtggatttcatgtccatttgttagaaatagaaaaatgtggccaggcacggtgactcacacctgtaatcccagcactttgggaggccgaggcgggcggatcacctgaggttgggagttcgagaccagcctgaccaacatggagaaacccccgtctctactaaaaaaaaaaaaaaaatacaaaattagcctggcatggtggtgcatacctgtaatcccagctactcgggaggctgaggcaggagacttgctttaacctgggaggtggaggttgccctgagccgagatcgcaccattgtactccagcctgggcaacaagagtgaaactctgtctcaaaaaaaaaaaaggaaaagaaaaaaaagaaaaagaaataaaaaaatgtagtatctttgattaattttcaaaagtatatcacagaagatagatatttgctagccatatttaaaaggaaatatttgtataatgggggtgaaaaaatgattatcacagtttagtaaacacagccatagtgcttcttcctttggattcatgtttctttttggttatgatagcattaaaacttggaatcaggcttttaaattgctctataatatattaaaatgagatttttcaaacataatgagaaatatttaatcatatggattgcactaaaatatttttaagatgggttttacattactattttaattgatggaagtaccattattgtgatcattatgtatttcatttgaaatgttttgtagtatttataggtattagtacctgtgttctgtttataaatgaacatgtgttggggatgtatactcttatttattggtggatgtgcagtaaaaggtttgtttgtggagaacggactgggcagggtatagagacttatttgatgtttattagagcaaatgtggccagtgatgatggtgttctggattggcttagggtgggaggagtggtgatagggatggagatacatggacaagtatgatttaagcagtagaggcattagggttctagatttctggctttttggaagagatgattgctagttaatgaactgagcttttgtgtgtgggaagaagttgaaacctggcccctgtgaattgtgcaagtagttcttaaatattgattgacaaatagcttaacgagcaactaattttcaaatattggttgacaagtggcttattacaatattgtaaatgcattgatactaccattagtaaagagaatgtcttcctttgataatgttagcagcactgttaccagagcagtgtgggatagttccaggactttcactgtctaaaaggaactggaggcccaagcttttacggggatacttctgctctcctggttcccatgtccccagtgatgtgaatgtccctgactcagtgcctctgctcacgctgtctgtgagatcactgccttccagtgcctcttacctcttgggcctgcccactttgttaacagggacagatttcacagtgatttccagccagtatttctctctccccagtttggggtgttagctagaatggtccctcaaagccctcaaacacggatgagaaatagaagaagctcagggagactatacctgggctaggttcttgctaccagctggtggaagacaaagaaaaccccttttcttcctgtatttcatgcccagtgagcagtagtgccatcagcagcagttgtgaacccctaaatcagtgattctcaatatgactgacatggtggggaagacgtaagtttgaaaatgcattttcaggctaggtgtggtggctcacacctgtaatcctagcactttcggaggccaacatgggaggatcacttgagcccaggagttcgagaccagcctgggcaacatagtgagaccctgcttctacagaaaaataaaagctagccaggtgtaatggcatgcacccatagtcctagctacttgggaggctgaggtgggaggattgcttaagcccaggagatcaaggctgcagtgaacataccacagcactccagcctgggcagcagagtgagacccctgtctcaaaaagaaaaagcatttaaaaaaaaaaaaggtttgttagtgtttgtctcaaaattttgcttaatttaaaattatgtatatatttgaataatatgtgtccatgttaatagttctaaaagtatatatagtatatatagtaaaaggtagttttctctccccctgcctttcagctttccctttccataggcatccacaagtactatgagcaatacttgtgaaaccatgctgaaatactacatgctcataaaatgtaagttacttaagtttggtatttcaagtaacaataagggaagataggagagttttatgtttatcaaaaggggtgaatgttatagcagattgagatgagatgttcttacctttgggtgggatcttaagtggagctcaattcggtttccccaatgttagtgggagagattacttaaaccatccatacttatccagttgtacttggtaagttttcaaaggttctactttgaagagggcttttgttgagcaagtagtggttaatagagcagctcagttacatgtgtaagttttttgatgtgggaaaagggcttttgtatacagaaggactattttaaaattatttgggctttaaattaacatgtattaaagtggtaaatttaaaacccagttttcttttagtcttgttattgtacttgtaagcataggcattttgtatagaaataagaatagtaattttcacctgcttgtcaattaagttaatataaatttaacagatttaattgctccaggccccttacttagtgaattaaatttccttagatgtttaaaatacatttacacagtcagtctgtcaggcacagtcagtccttgacaggtcagagttaccaccttaaacagaaacttcttaagctcttgggcaatctgtgatactaagaaattaaatttgtaaatgtagtaaaacaggttttggttaagacttccagtgcttttcattagctgaatctgaattaccaacatttaaaaaacacataccctaaacttaacgcaaaagtactactagtaccatgagtttgatataccatacctcattttattgctcatgtcttttctttctgggattgtgatgccacttacccaattaaggaggacagttttatcatctcagaaagccatggttatcagattaaaaatacagaatcatgatacagttattattggtcagagatttgagactgggaaagggaactaaggggtctgtgtttccaggataattctactcaagagatgctgtgcctttccttatgttaagagtcctgaatgtggcatcaaagggggaatccatgttcagagtttgttttgcaaccccccatacctttttttgagacaggatcttggtaggttgcccatgctggtgtgcagtggtgcaatcatggctcactgcagccttgacctcctgggctcaagtgatcctcccgcctcagcctcctgagtaagtagctgggaccacagatgtacgtcatcatgcccagctaattttttgattttttttttttttttgtagagatgaggcctcactatgagcctaggatgatctcaaattcctggcctcaaacagtcctcccgcctcagcctgcccaagtgctgggattacaggcataagccaccatgcctggccttttcttcaaaaataacccttcaatcaattttttttttcctggtcaaattggattttgtgtttcttttatatattccttgtcaggccctacagttattttaattttgggtgttggatagactagggttcatattccatgcctgccatgctttttgtgaacttgggcaaaatagttagctcttctgagactcacttttgtcacctagtaaatgggttcagctgtagtactctatgtatttgtttgttttaagcattagatagtgcgtggtaaatgcttagcacagttcttagcacatagtaaatctttaataaatgttagaaaatataatgatcttgattctctgtcttccctccctagtagttgatttggggcacagtgtagcattatttgaattatcacagaataactttttacctttctgattttaacaggggagagtgtgtaaaggatgggagagggaagagagaaaaaagctgagtaaatgtgatcaactttacagtctttattccctgaactatctttccctgagttatgtgacacattctccttgttttcctctttctatctttgtggccactcctcagttccctaggcccctcttctttgaccactccttgtttgagttaccaaagattccatctctggccttcttgtgttgattctacacgttcttcctggaagcacatgtccatggtttcagcttccttgctaattaggagaaactttgtcctcagaacccatctggattacagccaacagcctactggtctccattgggctatctcccaggtacctataacagtctcagaactgactcatcttccttttcagcgtgttatttttataatctctatcttgatgaatggcacaacacagtgacccaaactggaaacttgaatgttgttcatctggttggtgatctgttcctaactgttttacatctgtaacatttctcaaatttgcctattttccaccatttctcctatcccttaattcaggctgcttctcacctagatgactgctgcaggttcccttgttgtctactcattattagtttctcattccaagtcattgattagatggctgccaaaagtgatctctttaacttcccaactttagattctgtgaataaaatccaaactccttaacagagcaggccctcatgatccaactcctcttaacgttggtagccttatcttttctctgagcccactgccgcttgatccttggtggtgctgtgctctttcttgctctctgtctttggttggactgcccacctccctccttcttacttgacattataatttatcagatagagatcagctcctccagtcagcatttccttactgactactccaagtctgacccagtgtagattctgtgcttatatctgtcaagtcacttattgtatgataattcatacacttatatgataattcacacattggcatgtgtagattaaacatttatagtctcagaaggatcctgatagtccaaaaggtatagtaatgcagttgtctcttagtatcttcaggtgattgattccaggatcccccccatggagatcaaaatccagggatactcaggtgccttatataaaatggcatatttgcatgtaacctatgcacatcctcctgtgtactttataggccctaaataatctccagattacctatatggctaaaacaatgcaaatactatgtaaatagctgttatactgtatttttaagtttgtttcttattttatggttttatttgtttatttttttgatctgtggatgtgcaacccacagatagagagggtcaactgggccgggcgcggtggctcacacccgtaatcccagcactttgggaggctggggtgggaggattgcctgaggttaggagctcgagaccagcctggccaatatggtgaaaccgtgtctctactaaaaatacaaaaattagccaggcatggtggcaggtgcctgtaatcctagctactctggaggctgaggcaggacaattgcttgaacctgggagttgaaggttgcagtgagccaagatcctgccatagcactccagcctgggcaacagaatgagactctgtctcaaaaaaaaaaaaaaaaaaaaagaagagagggccaactgtatgtaatttactgaagcatggattcacattatagatggtccctgatttatgatggttcaacttatgatttttatactatgatggtgggaaagctggtgtgatatacgtattcagtagaaattgtacttccaattttgaaatttgatcttttcccaggctagtgatatgcagtgtgacaatttctcatggtgctgggcagaagcattgacccacacctcccagtcagccatgtgatcaggagggtaaatgagtatactccatggtgtactgtgttgccaggtgattctgctcaactgtatgctaatgtgagtgttctgaacacatttaaggtaggctaggctaactatggcattcggtaggtaaagtgtgttaaatgcatttcctacttaaacgatattttcagtttatggtgggtatattggaatatagccccattgtagggcaaggagcatctttatttacccagttgagtttagtggcagcagaactaagttcggtttagctgttcagtgagccaagcctcacttagcatctaattctgtctttattttctgctttagataggccacagctctcctgaagggattaagactttctgtgtgaaaaatggtattcagaaggaagccagcattaattctgtttttatacatttatgaagatttgaaggaatttcactgtcaattctgtcttaattgtattctgtataataaatcataatggtatccaacggctcttgaaaggtttggtttttgtgaacatttctttgaatgtcaaagttgtattagtttgtttctcaattaaactgggtgctctttgagggcagggatttatgggacttgtttgttttgcagttttatatctccagctgctaatgcagtgcctggtttgtagtaggaatgagagatttactccaatagaaccatactaaagatcttacacttatggattacagttgatagctttgtagagtgaactggtattccctttaaatgagacgacatgacctgagtataaagtataatcaactacatgactccagcaagaataccatgtgtccctcagatagcatagctggcagatggagttatgcacatcaactggacatttaagacagctggagatttcttacatttagatgacagtttagattagaaatatttaatcttagctgtacttaatatattatgtagctatatgatacatcatgtatatatggtatatcatatatatcatatatttaatcacatttaatccttagctatattttcatccccaaaatggtatatggatctgtttttattgtcagctggttatttattgttgcttatccatggctcatgaaaatcttcatgttacttgggaaatctttcactctgccttttgaaggacagcccagaaccatttccttcttggcacatgaccttctaacccagtgaccaaagagtatgtaaaagcatggtacacactgcttttgaagattacgtgtgtctattctagatgtgtcttatttcttgcagatatattgcctacaaagattttgatatatatatatacagtagactatactatataattaatatttataccagatattaaatatataagcattctactagaactaaagttaagaatttgaaatagtctcatgtgagtaattaaaataacaatagcatctttttcaagaaagttttttttaatatggtggagataatgacatggaaaaaagtagttaattatttttggtattcccgtatttcatcagtaggttgccatagaacataatagttatataatcaaacagcagaataattttatatgaggtttattgatacagaaatgtttggttcagtgtttgtcttccagttttgcagattttcttttcgattttaaaactggagaatacattaaaaccagaaactttcagcctctataatgccctcaaaactcagcaggttttgaaaatgcctcttccttctcttctcctccccataatcctgcttatttttggcattaagtgagtcaggggttccaaacccaaatacgtttttcaaggctatgtagtcagtgtgaatgagagaagtaaatctgttgggtcctgtgccacactggagtttccaaggctggtctaaatgagttcaacttcagtttttttgtgtttttttagagatggagtcttgctgtgttgcttgagctggtcttgaactcccgggctcaagtgatcttccagccttggcctcccaaggtgctagaattataggcatgagccactgtgctggccaatttttttttttttagcccactgtgctaccagtttgtgatcttcactttaactgtgaaaggactgtcaaagattgtacgtataagatttagtttgagagccaggcctggtggctcatgcctgtaatcccagcactttgggaggctgaggcgggtggatcacgaggtcaggagatcaagaccatcttggctaacacggtgaaaccccgtctctactaaaaatacaaataaattggccaggcgtggtgacgggcgcctgtagtcccagctactcgggaggctgagacaggagaatggggtgaacccgggaggcggagcttgcagtgagcagagatcacgtcactgcactccagcctgggcgacagagcgagactccttcacccaaaaaaaaaaaaaaaaagtagtttgtctttctctttgaaactgaattcattaaacaaaagcctaaataactatactattacttgttatttatttatttatttattttagacagagtcttgatctgtcagcaggctggagtgcagtggtataatcttggctcactgcaacctctgcctcccaggttcaagtgattctcgtgcctcagcctcctgagtagttgggactacaggcatgcgtcaccacacccagctaatttttgtatttttggtagagatggggcttcaccatattggccaggctggtctagaactcctgacctcaagtgatccacccacctcagcctcccaaagtgcataagtgctgggattacaggtgtgagccaccacacccagcctactacatattcttttagacccagctgaaatatcacgtaattgctgaaggctcctgaactcttccagatcagggattgattttcctcattttaagattgtcatgacaactgtagtattgataactgtattttattttattttattttttttgagacagagtgttgctctgtcacccaggctggagtgcaatggcacgatcctggctcactgcaaacttagcctcctgcgttcaagcaattctcgtgcctcagcctcccaagtagctgggattacagatgtgcaccaccaaacacctggaattagtctggctaatttttgaagttttagtggagatggggtttccccatcttggccaggctgttctcgaactcctgcctcaagtgatccacctgccttggccttccaaagtgctgggattacaggtgtgagctaccgcacccggcttattaaccaatttttaatgttcagcacaacttgatcatgatgtacaatgtcttttttatgttatgtgttgatggagtcaaattaccgatattttggttcagttttttcaataagagatcaggctattttctgattttcattctgtttttttctttgatctgtatgtatttataagtgtctcttattttcaaataggttttttctagttatctttttgtaacggatttatagattatacattgtggttaaagaatatggtctataggctgggcacggtggctcacacctgtaatcccagcactttgggaggctgaggcagggggatcacttgaggtcatgagttcaagaccagcctggccaacatggtgaaaccctgtctctactaaaaatacaaaaaaaatttagccgggcatggtggtgggtgcctgtaatcccagctactagggaggctgaggcaggagaatcgcttgaacccgggaggtggaggttgcagtgagccgagatagtgccactgcaatccagcctgtgcaacagagggagactccgtctcaaaaacaaaaacaaaaaacaaacgaaaacacacacacgcaaagaatacggcctacatgcactttcagtcctttggaaattgttggtatttatttgccatttggcctagtttacccagattccacaggttgttaatgttgtacaattgcgtcttctctttctcacttcacccatctatgtaatttttctgaatcatttgagaaataagttgcaaacataatgctgtattacccataaatcagggtgtgtttcctgaaaacaaggatactctcctataaaatcaggaaataaatattgatataatactgccatctgattcacagaccctactcaaatttcactgatcttccaattatgtcttttatagcaaaaacaaaacaacagaaaccaacaaaattccctcaagaaaacaaaagcagaaaaacttccctttccccttcacttatttctgattcagggaccattcaggattatgccttgcgtttagttgtcatgtctgttcagtctcttttaatctagaatagttctcagtctttccttattttcagtgatcctaatatttttgaagagtagagaattattttgtagcaagtcccacaatttgggttagtctgatgtttccttttgaatagatttaggttatgcatttgtggcaggaataccaaagacacgatattatgttcttctcactgcatcgtatcaagaggttcatgtcaatttgtccaattactggttatgtttaattttaccacttggttaagatgttggctggcaagtttttgtaaaattagtttagaggtatttcatacttactggttagtaagtaataatgcattttgtggggtgatgctttgagactatataaatagcttatttctcatcaaatttttgcttgctagttttaccatccattggtgatttgtgcctgaatcagttattatagtggttgctagatggtaaatttaaaaaatttcattatttcttctgaattcatcacttggcatttctttttttttttttttttttttgagacggagtctcgctttgtcacccaggctggagtgcaatggcgtgatctcgtctcactgcaacctctgcctcccaggttcacgtgattctgccacctcaccctcccaagtagctggggttacaggcacccgccatcatgccctactaatttttgtatttttagttgagatggggtttcaccatgttggctaggctggtcttgaactcttgacctcagatgatctgcccaccttggcctcccaaagtgctgggatcacaggcttgagccaccgtgcccagccaatcacttgctatttcactctaaggaaaagctttctctctctggtttttgtctttgtttttgtttgtttaaaaatcttttaaacatatgagcacagcctcattgattcttattttgttcctttttcatgtattttttgatattcaaattgtcccaaatttggccagtgggaaccctttcaggctggctcctgtgtcctttttccatgtcctcatcattctttttttttttttttttttttttgagacagagttttgctcttgttgcccaggctggggtgcaatggcgtgctctttgttcactgcaacctccacctcccaggttcaagcgatcctcctgcctcagccacccaagtagctgggattgtaggcacctgccaccacacctggctaatttttctatttttgtttttattttttttattttttgagacggagtcttgctccgtcgcccaggctggagtgcagtggcgcgatctcggctcactgcaagctccgcctctcgggttcacgccattctcctgtctcagcctccaggcatgcgccaccatgcccggctaatttttttgtatttttagtagagacggggtttcactgtgttagccaggatggtctcgatctcctgaccttgtgatccgcccacctcggcctcccaaagtgctgggattacaggcgtgagccaccgcgcctggcaatttttctatttttagtggagacaggatttcaccatgttggtcaggctggtctcgaactcctgacctcaggtgatccgcccgccttggcttcccaaagtgctgagattataggcatgagccaccacgcctggtcatgtccccatcattctttgatcactttttttcttactttttggaataataagattttctgtgggctgggcgaggtggctcacgcctataatcctagcactctgggaggccgaggctggtgggtcacctgaggtctggagttcgagaccagcctggccaacatagtgaaaccttgtctctactaaaaatataaaaattagccgggcatagtggcacacacctgtagtcccagctgctagggaggctgaggcaggagaattgcttgaacccgggaggcggaggttgcagtgagctgagattgcgccactgcactccagcctggatgacagggcgagactccgtctcaaaaaaaaaaaatttctgggctcatctttacttttgttatctcagtcgtggaatcaataattttatcagggaaccctggttccttttattagtgaatgtacttagaaaataaaatatgtgcactactagatatgttctttctattggggtgttcttccttttaggctctatgtgaggagagaactagaatattgttttaaaatgtaccaggtaatcccagcactttggtaggctgaggcaggcaaggctggcagatcacttgagatcaggagttcgagaccagcttggccaacatgatgaaaccccatctctaccaaaaaacacaaaaagtagccaggcgtggtgacacgcacctatagtcctagctagagtgagatagagtgagaccctgacttaaaaaaataaacaaataaataaaatatactggaatttaatttataggtatgaatgacacagagaggccaatattattgaaaatgtgttactcacagttcttctgaaacagcaggcgcaccatactatgcaggaccacatggggaagcaccagggtgggtcaggaggcagaaggaaccagaggaaaggatgggtgagttttttttttgttaaagtgctagaaagttgttaggtgggacatcccctattgagcagaaagagaaacacaaatgttgagatttgtggttggacggtttgtaatatgatttttgtgtagcctcaaaaacacagagatggtatgaatgtaaacaactttggtcgttaatttggcccatcctttcaagatgccaaatcatcaattacagaatatcaagaatgattatataggtatgtatgcatgtctatacatacatatatacatctgtatcttcctgtaaataatgaaagccatggtttcattccaatactcttaattctagtccaacacaatagggtttcttctggtgtttcccttttctgacattgaaaaatctgaggccaggcacagtggctcttgcctgtaatcccagcactttgggaggccaaggcaggtagatcacttaaggtcagttgctcgagaccagcctggccaacatgatgaaaccccatctctactaaaagtacaaaagttagccaggtgttgtagtagtggtcgcctgtaatctcagctactcgggaggctgaggcaggagaatcgtttgaacccaggaggtgggggctgcagtgagctgagatagcgccactgcactctagcctgggcgacagagtgagactccatctcaaaaacaaaacaaaacaaaacgaaaaatctgcctcctttttttttttcattcattcattaattctttagatggggtcttgccctgtcacccaggcggtagcgcagtgacacgattatagctcactgttgcctcaagccatcctctcgcctcagactcctgagtatctgggaccatacaggcacgtgccactgtgcttggctctcacattgtcctttttactcaccttcctgttggtgacaatctcctgactatgtaggccattttcttgcccccagccccactgaatgagctggctgatcactccttcaagttccatgagccattgttacatacaggtagtactcagtttgcttggttttgatattcataaatttccattgctgtggtttaattaaataatgccagtcctcaaatagcagttaatgaaatacaaaatataacctgtgatcaagaaaagcttctcaggtgggcgtggtggctcatgcctgtaatcccagcactttgggaggccggggcgggtggatcacctgaggtcaggagttcgagaccagcctgaccaacatggtgaaaccccatctctactaaaaatacaaaaaattagctgggcgtggtggcaggtgcctgtaatcccagctactttggaggctgaggcaggagaattgcttgaactcaggaggcataggttgcagtgacccaagatcaagccattgcactccagcctgagcaacaagagcgaaactccatctcaaaaaaaaaaaaaaatagcttctccaaaattttaaaaatttaccctgaccctgaaatagttgattgttccctccctagacatcattcagttggagctagcctaattttgttttttttgttttgttttgttttgagatggagtcttgctctgttgcccaggctagagtgcagtggcgcgatctcggctcactgtgacctctgcctcctggttcaagtgattctcctgcctcagcctccagagtagctgggattacaggcgcgcgacaccacacctcgctaatttttgtatttttggtagagacagggtttcaccatcttggccagactggcctcgaactcctgaccttgtgatccacctgcttcggcctcccaaattgctgggattacaggcatgagccaccgcacccagcctttttttttcccttgaggagaattacagtctgcactgctctcagctgaactttacacagcttttacatttccctctgtcagttcctcttgtaatggtgggtgggtagctgaagggaggatatgtacaataatgtatttttagttcctttgaacagagaggttgcttcagccattgctattgatggcaggaagtatatttatagctccagggaaggaggggtagtacgactgctggtttaagaaaacctgggagattgtatttaatatatgttgttaaaactcatttgtactttattgtaagttcttgccttagaaatgcagctgagatgaatgaacctgttacttatgttatattgttacttatgttatatatgttatatgtattattgtaagtatattgactctgctccctaatttggaaaaatcttccgttttgaaattttacaatatacaatacctaaaacaaagagtacttctagagcatacaggatgtatgtggagaattcaggtgttagcatgcaattgaacagtaaagatactgactagcagtataaatatcgtccccatttagatattttattcataaagttcttgttggtgtagcttttattgtgattttttcttttttttttttggatacagagtctcgctctgtcacccaggctagagtgcagtggcgcagtcttagctcactgcaacctctgcctcccaggttcaagtgattctcctgcctcagcctcccgagaacctgggactacaggtgagcattaccacactggctaatttttatatttttagtagagatggggtttcaccatgttggtcaggctggtctcgagctcctgacctcaggtgatgcacttccctcggcctcccaaagtgcagggattacaggtgtgagccactgcgcctggccaattgtgatttttttaaagattgaaaccaaaatattttatacagatcataagatattcttggtaaacactaagcacctcataactttaccacaattttgattgcacaactttcacctgtggttatcatgtgcaatgggcacattcaacacaaatcaaattattctgaagcttgctttctttcttttttccctactccctttcttaattgaggggagcaaaaagttggtttccagggatatgtcttctctcttatgctggtcccagattgatgcagtcatggaaactaggcagtaaactcattcttggcagctgccggcactggtctgattctttcttttaaaagcatgagattctttaataacacatattggaaagattgatgccaagtgattccaggtcatcctagaggaggcttgggaacattgttgaatagatttaaatgattcagttaagtgagtgatttaacccaaggtttgtgtctaatttaaacaggacctataaaatatagaacaattggtttgtttcttttttagaatattgaagattagattttaatttgagaattttactaatttgagggttttattttttgtttttaagcgttcaaaatgttgaattgtagatatgctgagttttataatgagcacaatgaaggtttttcaactggcccgttaaagccaacccactaatgaaatgaaaatatgaaatattatgactccataatatttcatggattttgaagctgggctgcctgggttcaaatcccatctctgctactttttgggtacgtaaccttgtgccagttacttaacctctctgtgcctcagtttcttcatctgcaaaatgggagatagtgcagtttgagtgttcctaatctgaaatctgaaatgctccaaaatctgaaactttttgaatgcctacatgactgctcaaaggaaatgcttattccatggagcatttggatttcggatttttgggttaagaatgctcaattggtaagtaagtgtaatgcaaatattccaacatctttaaaaacctgaaatccaaaccacgtctggttccaagcattttggataagggatactcaacctgtaaataatgtctgtttcatggggttgtgatgtggagtaagtgagcaaagttgtgtaatgtgcctagcttatagggaacacttagcaaatgttggctattccatttatatataagaaatagaattattggctgggtgtagtggctgatgcctgtaatcatagtgctttgggaggctaaggtgggggattgcttaaggctaggagttcaagaccagcctgggcaacatagcaagactctgactctgcaaaaaaattcacaaattagttgggcgcggtggttatatgcctgtagcccttgctactcaggaggctgaagcaggaggatcgcttgagcccaggaatttgaggctgtggtgagccatgataatgccactacactccagcttgggcaatagagtgagaccccaacttaaaaaaaagaaagaattattgatgggattgtaaaggctgaatattaaataaattcagaggaggtttttacggaacttatttgtgaaatatttttaaaggaaggaaggcatgtttgttttaggtttataagagatggcagatttaggaagctcctccctactccagatgaataagccatctgtttttctatcccttttaaggatttgcttggtgggtttccataacttttttttttttgagactggatcttttacccacccaggctggcgggcagtggcgcaatcatggctcactgcaacttcaatctcctgggctccagcagtcctcccgcctcagtctctcttgagtagctaggaccacagacgcgtgccaccatgcccagccaatttttatttatttttttgtgtgtgtggagatagggtctttctatgatgccccggctggtcttgaactcctgggctcaagtgatcttgctttggccttataaagtgctgggattacagttatgagccatggcgcccagtctatgtattcttacaaaattaaattcatgttaagtgctacactagcagaatttttaaaatttttaaatgatgcacaaatagagaagagagagtgcaaattaacgagaaataggcaagactaatttgaagaaaactatgaagctttactgaaggatttttttaaagatataaaatgctggccaggcgcggtggctcatgcctataatcccagcactttgggaggccgaggtgggcggatcgtgaggtcaggagatcgagaccatcctggccaacatggtgaaactccgtctctactaaaatacaaaaaattagccgggcatggtagcggatgcctgcggtcccagctactcgggaggctgagctggaagaatcacttgaacccaggaggcagagttgcagtgagccgagatcacaccactgcattctagcctggctagagagcaagactccgtctcaaaaaaaaaaaaaaaaaaagaataggcaaataactagagaaaaatagtccagaaacagacctgaatatatataggaatttagaatatgaaagtgtcagtgtgtaggaaggagtgaaatgaaaaaagaaagaaaaaaggaatatgttgaaagtggcattcagaaatcagggagaaaatgatcgattactaagaatgatcctgtaacagtgggctgtttggggaaaaatacgtaaagatttctaatttagactatattcaaataatcaccaaattatatagagcagggatacccaacctccaggccacagaccatcctgttaggaactgggccacacagcaggatatgaactttaggccagggaacattacacctgagctctgcctcctgtcagatcagcagcagcattagattttcataggagcacaaaccctactgcgaactgtacactccagggatctaggttgtgtgctccttatgagaatctaatgcctgatgatctgaggtgttgcagcttcatcccaaaatctgaaaccatatcctccacccctccatttcatagaaaaattgtcttccacaaaactggtccctgggtgccaaaaagattggagaccgctgataatagagtatatataatcaaattacagaaataaccacactctattcttcctctagaatatactgaatgtttcctaagaaaagttgaacactcatggctggttggctgctctctagcacatcttgccttcgtctctcactagttgaattttacacttccaggggtcagtatgtttgttccaaatctgcttatgccagttacatttagtactgtaattttataatttaattaaacattaactaatgaaatatgactgcaaaaagtagttgtttttaggaaaattaagttgtagatcttgaacaaattggataaatacaaatccccttttccccttttcaccaaattactgtcttactaattgtgggcgtgaatattttgaaagattgggggtggaaatcataaaattcttttttttttttttttttttttttgctcttgtttcccaggctagagtgcaatggtgtggtctcagctcaccacaacctctgcctcctgggttcaaatgattctcctgtctcagcctgccgaatagctgggattacaggcatgcgccaccacacctggctacttttttgtatttttagtagagacatagtttctccatgttggtcaggctggtctcgaactcctgacctcaggtgatccacccgcctcggcctcccaaagtgctggtattacaggtgtgagccaccacacctgacctcgtaaaattcttaaacgatctatactcagttgtcttacagttgcctagattcttgttccatttaaagaaactgaaatttgaaatcacaaatgtggattatggatatgatgggttatggatatgatatatttgtaatgaatatgcaagagagaacatttgaaacattaattagtagaaatgtacttaaagaagaggccttggttttttaccgtaatattggcaggtgacatgtatttgttttgagtaaaaatcaaatatttcagttacatttttaaaattacctgatatactgtactttttcatgtaaccagtcagccctgagtcctatttgtgttagataagtttttaccaatcccagaaggagatagaggacaagcttttatatgcttcggctgaagaaaacctttctccaaagaagtaattatctgatcctcctataaagggccagatagtaaatattttagattttgcaggctgaagtagaatcaagggtaatacgtacgttctgatataacaagagagaaaacaaattttgagaaatttcttaattgattaaattcaaaataataaacacaatttattgaaatacaggtatactaatgagaagaatggagttcttttcggagtgataacattttcttaattggagttcagagttagtgcttcctattcaataaataatcatcaaaattgattgcaagtatttatctattaatgcaggtctgtaatgaggttttatatatttcatctttgacatgtcttcacacatacatgtcaaataattgataccagcccataaacatatgattttaattgagcatattaataactcaggaagcatttatagaattaggtttttcttataacatttaccttttagtatattattcattgctgcttaattacttccaatggaaggttagacagaagctccacaattgcactgttaaatagatactgaaatatagatatttccttgtgcattaaggtcctaaaaattattctggaaatgtagtgtgagctaagaaactatatccactgcaaatttgtttgggaatggagatctcacttcttgttttaacttttgatagcatgtaaagtgtataaagcagctcaacgttgcttatgattcaaaagttagttgtctaaataacaacagtttaagtttcatatataagtgttgttctgtcctgtaattttaagttgaatttactattataaaattagcaaaagctaattctcaaagccatttattgtttgatcatagtgtctgaaagcagtcttattgttgtgaaaaatttcaatctcagttccaagctgaaaagaaaaaaaaaaaagcatgataaaactttagtacagctcagccgtcaaactgctgtgtgcctgggcaagtcaggttattcagcttctgtttctgacaatggttaagcccatggcagtgaatgaaattcaccattaacatggttggtttaataattcatgataaattcagatatttttcatagaatatctattgataaaaaacatgaataaccaccttacattttcacgttttataaatcacccaactaagcctttttctgcttcacacatatttttaccattatcaatgataacgtatctgagattccactttaggttatatggaattagtactttttcaccttcttgtttgtagttgttcaacacagactattcatagaagctaattcttcagttgttttaaacttggcactgactccttgaataaacatctgaacagtgttgtaacatctatcaaactcattcaaaagagatggaaatctacttaacctcaattgccttggttttttttttaaacagattattgatcttgctcctaatattttcgacttttagagcaaatgattttgttgaaaggctaatagtctttttttctttttaaattatcttatattaaatttaaaaaataatttttttgttacctgtctggagaaagcctagagaaaggctaattaatactcttaaacaagtttattttctctggatacatttcttcagcttcttcatgatttaattcacttatcactagaatattacttttcttgctttgctaacaaatgagctacttagaaacttccctcctttacaaactttctattccttaccttccctccttgctgtaatgaaatattccactttaaattttcaaatttttctgaccattgctttcctgtgaatcggaaatactgtgatcggtccttagtttggtaacattgatgtattttgaattcttttagcacagacagacagttgactccttgaacaacgcagtttcaaactgcacaggtccaattatatgagaattttttttcaataaatacaatcagcagtttatacatatacaaccaaacgtggatcaaaaatacgttatttgaggaaacccccagatacagaacagtgaaatttttgtatcctctgggccactgtgggacttgagtgtgcatagattttggtatccacggttgatccacagataccaagggatgaccgtagagtcattgcataataaacaaaatgcttccctatcttgtcttgataaaataatgcataccctccactgtgccttaaaagcatgacattcaggctgggtgtggtggctcacacttgtaatcccagcacttttggaggccagggtgggaggattgcttgagcccaggagttcaagaccagccttggcaacatagtgagagtccatctctagttttaaaaaaatacaaaattaaaaaaaatgaaaaacatgacattcaaagtgcatttgtttttgtttcgacatgatggttatgcactaataactaatgatagttatgtactaataaaatgtcaaaataataacgacttttagttactgataacagttatgcattaataaaaaataaaatgtcacagtatgacaatatgcatgtgtggcaccaaacatgctgttgagttataactttgtgactgtgatttgtgggatactgagcagcagtggaaagctatataagccactccactctgccagtcagtacagtggctgattaccaattatggataaccagaacacatcaaaaagcagttcaacaaggatcagaataataacatgtaagtaccatttattaagtagttatgtgtaaggcactgtgtcagactgtataatgtacattatttaaccttcaaaagattgagagggaagatcccttgagtctgggaggtcgaggttgcagttagctgtgattgcaccactgcactctagcctgagtgatggagcgaaatcctgtctcaaaaaacaaaacaaaacaaaacaggcctggtgcggtggctcatgcttgtaaatcccagcactttgggaggctgaggctgaggtcaggagtttgagaccagctgggccaacatggcgaaaccacgtctctactaaaaatacagaaattagttggtgtggtggctcacacctataatcccagctactcgggaggctgaggcaggagaattgcttcaacccaggaggcggaggttgcagtgagccaagatcatgccactgcactccagcctggatgagagtgagactccatctccaaaaaaaaccaaaacaaaacaaacgaaaactacaaaagattgtctgaagccagccacagacaatagtaaatgaatgagtgcagctacattctttcttatttatggatgcagaagtttgaatttcatataatttttccgtttcacttatatataaattatatattatatattacataatatataatatatattataagataatataatatatattagataatatatataatataagataatatatattagataatatatataatataagataatatatattatataatataattaaaatatattaattataatatataatatatgacatatatatgttatatattgttatatataatatgtgtaattatatattataatatatgatatatatataatctatcatatatcatatatataatctatcatatatcatatataatctatcatatatcatatcatatataatatatatcatatcatatataatatatatgatgtatagtatatatgatatataacatatatataatatatgatgtatagtatatatgatatataacatcatatatactatacgtcatatataatatgacgtatagtatatatgatatatgatatatatactatattgtatatgatatataatatgtattgtatattatatataatatatatataaggcacagtggagggtatgcattatatataatatgtattatatattttatatattataatatatattttatatataatatattttgtatattatatattttatatataatatattttgtatattatatattttatatataatatattttgtatattatataatatataaaatgtatattatatataagtaaagtatatattatatataatttttatatatactttttttttttttttttttttagactggatcttgctctgtcacccaggctggaatggagtggctgggactacaggtgtgtgctatcatgcccagctagttttttttttgttttttttttgttttttttaattttttttttttttttaagacggagtctcgctgtcacccaggctggagtgcagtgacatgatctcggctcactgcaagctccgcctcccgggttcacaccattctcctgcctcagcctcccaagtagctgggactacaggcacccaccacacgtccagctaattttttgtatttttagtagagacggggtttcactgtgttagccaggatggtctcgatctccggacctcatgatccacctgccttggcctcccaaagtgctgggatcacaggtgtgagccaccgcacccggcctactttttattttaacttttttttttttttttgtagagatgtggtctcactgtgttgcccaggctggtctcaatctcctggggtcaaacagtgctcctgcctcggcttcccaaaatgttggtattacaggtatgagccactttgcctggctatcttataaataattttgatgttaggaatttttagttgcttttatttttatttttgttgttttaaatatttattaatagaagcaaggggtggataaatcttctagatcaaactcttccttaaaatagttctgcttttggtaggattccagattttcctagttttgttaagtgtttctaatgatgtttggcataggtgttaacttcatgggcctgttgtatacaaaccaatttttttcttgctctgagtgaacagtaacagaacctggtaggtgagtcacactgatactgcattcactgaagttactaagctgaatgataagagatgagaatcctttgcatttgtattcaaatcaagagttgtagaatttgaaattcctgttttgatgaactatgtgaagcatgctgtcattcttctctgctagtctatgttgatgatgtcattaaactagtctttgacttttagttcttggcttaaaatattggaatgattatataataaataggtttatttcatgtggaaaaggaataatgtgtttgccctgaaatagtctgatctgatcaggaggatattatgctgagcatggctggaaataaatttgtagcaccaattaaatacactgtagcagctctgagagggaataaaagtaaaatataaatagtaaatatgagagaaagtgactatgggatctaactatgtaagagcagggtgggagtatgggtagatacgtacatgccccctagattttaggaaagcatatttcaagaagtagagaagacatggatatcaatcagtggaaatcgtatactaaaacggaagtcagtgaaaaaaaaagactgctctcaaactaaagatagatggttgcttctaataggtaggtattcagattcgattaagaaattagaaggccgggcatggggactcaggcctataatcccagtactttgggaggtcatggtgggcagatcacttgagcccaggagttcgagacaagcctgggcaacctggtgaaaccccatctccacaaaaaataccaaaattaattagcagggtgtagaggcacatgtctgtattcccagctactcaggaggctgaagtgagagaatcacttgagcctgggaggttgaggctacagtgagccgagatcacaccattgcactccagcctgggtgacagagtaagaccctatctcaaaaaacaaattttgaaaatatacagaagtatagaaaaactgaagtaatttaatttgtgttaaaatctgtttggtattaaaactaatgtttggccgggcatggtggctcacgcctattaattatcctagcactttgggaggccgaggcaagtggattgcttgagctcaggagttcaagaccagcctgggcaacgtggcgaaactccgtctctacaaaaaatacaaaaattagctgggcatggtggctcacgcccgtagtcccagctcctttgcaggctgaggcaggaggatcacttaagtccaggaggtggaggttgaagtgagctgagatcgcacctctgcactccagcctgggtgacagagtgagaccctgtctcaaaaacagacaacgacaaaaaaccctaatgttttatgaaaaagctctttaatttttcgtgaccaaactgctattctctagacctacactgtccaaaatgatagccattagccatgtgtgctactgtgttggacagcacgtatttagaacatttccaacatcacaaaagttctattgcagaatgctatgaaaatgagatacactttcattagaaaagctagtaaaaataagtaggggtaatggggtactttgactatccagaaattttactaaggaagaattagatttttataatactgggacattagtgtgcactttttttgtcgtaattgcattttgttttttattttgaaataaatacatgtacagaaaaattgcaagaatagttacagagtcttttcgctccctgaaccattagagagtgagccccatcagccccaaatactttaatgagcattaaatctggagtttggccgggcacggtggctcacgcctgtaatcccagcactttaggatgacgaggtgggcagatcatttgaggtcaggagtttgagaccagcttggccaacatgatgaaaacctgtctccactaaaaatacaaaaaaatgagccgagcttggtggtgcacacctgtaatcccagctactcaggaggctgaggcatgagaatcacttgaacctaggaggcggaggttgcagtgagctgagattgtgtcactgcattccagcctgggtgacagagtgagaccctgtctccaaaaataaaataaaataaatctggagtttaataccagtacagtactaccagcttatcttcaggccccattcgagttattctagttgtccccaaaaggtgaaggatccagtttaaaatcacacattgcatttagttgtcatgtctgtctttgacttgatcgccttgacacttttgaagattacaggctcattattttgaggaagtcattaacatggacctgatgtttcttcatctttagattcagattatgcattttatcagaattgccacataaattgtgctgtgttcttattttatccatccaggtactacataatttccatgtgtcccatttttcttgatgttaaccttggtcacttgattaagattgtgtctgccagttttctctaccatacatttaactattttttcctttataatcagtattttatgaggaggaggaggaggtactttgagacaatgtaagtatcccattcctcatcaaactttcaccttctagttttagcacccattgaaatttttttgctggattattggtatgatggctgccaaatgatgattttctaatttcatcatcccttctacatccattcattgacatttcattgaaaggaaaaactgttttcttcccatttatttaacttatatcaatatggacttacggattcatattttattcaataagttatctattagtgtactttggtactttgatgctgagtttgtcccagatttggtcagtggaaaccctgtcaagctggcttctgtatccttttgacattgtcctatcattctttgatcactttcctctttctgggaccagatatgatcaaagcccttcttatacttttcctgccctacctctggaatcatttcaccaaggtaccctggttccctttattgaagaatgtatttagaggttaggtctggacagtagatggcattgttccactgaggtgtcactgctcctagactttctcagcagacagagctagagcatatatgcatgtatatacatacacaaacatacatccacacacatagactcatttttttatttcttgctctgtgtgtgtgtgtgtgtgtgtgtgtgtgtgtgtgtactgtgagttcacactggtacctagtacctcaacacctcagagttcattttatttttcttcctttttgtatttgtaactcccttctctgacagagaaactgggccccagtttttcttaatatattactatttacttaattgatcaatccccttgaatgtgcccagtctttcctttccttatcagatcatgtgcatgctaaccttgctcagccccacctaatggtttttagactgaattatttggagacgaaaaaagtacggttgatgctcattagtcacagattttttttatttgcaaattcacctacttgctaaaatttatgtgtaaccccaaaatctgtactcgtagcacttttatggtcattcatgaacacgtacagaagggtaaaacatttgagtcgctattgggtaacgtgtattcctaggtgaggccaagcaaggcagtctactgccttcttctttgagtcctcatactataaatagttgtcccttttgcagtttacttagcgccacatattttgcattttgacttcttttacttagcatgtgttttcaagttccatccatgtttatagcatgtatcagtacttcattcttcttcttttttttttttaaagagttgggggtctcactgtgttgcaggctggaatacagtggctattcacataggccatcatagcatgctgtagcctcaaactttcactgggctcaagtaatcctcccacctcagcctcccaagtagctgagattagaggtgtgggccactgtaccaggttccttcctttctaaggctgaataatagttcattgtatgtataataccacattttgtttatctattcatccaataatgggcatttaggttatttccaccatttggctatcttttgaaaatcttttcatgtgcttgttggccattagtatatattctttggagaaatgtctcttaaattctttgcctattttttaaattggggggaagttgtctttttttgttactgaattgtaagagttctttattctgataactagacccttatcagatacatgatatctgattaacacatagtttcttgcatcccataggttgtctttcaaaattttgacgaattccaatttgtcagttttgttgcttatgatttttagtgtcatatctaagaatccattttcaaattcagtgtcatgaagatttacctatgttttcttctaagaattttatagttttagaccaagcgcggtggctcatgcctgtaatcctagcactttgagaggctgagacaggcggattgcctgagctcaggatttcaagatcagcctcagcaagatggtgcccatctctactcaaatacaaaaaattagcctatggcgtgtgcctgttcagctactcgggaagttgaggcaggaaaattacttgaaccatggaggcagaggttgcagtgagccgagattgcatcactgcactccagcctgggccacagagcgaaactatgtttccaaaaaaataataacaataattttatagttgtagctttttaagtttttaatccactttgatttttttgttttgttttgttttttgagacagggtcttgctctgtgctgcaggctggagtgcagtagagcagtcttggctcactgcagccttgacctcctgggctcaagctatcctcccacctcagcctcccaagtagttgggatcacaggcttgtgccaccatgcctggctaatttttgtattttttctagagatggggtttcactattattgcctaggctggtcttaaactcctgggctcaagtaatccatgcccaccttggcgtcccaaagtgctgggattacaggcgtgagccaccactttcagtcccaagttaatttttatatatggtatgaggtaaggattcattcttttgcatgtgaatatccagttgtcccagtgccatttgttgaagagcctgttctttccccattgaatgttgtcttagcactctttccaaaaattagttgaccatagggcatggtggctcatgcttataatccaagagctttggaaggcccagatgaaaagattacttaaggccagtatttcatcaccagccagccatggtggtgtgtgcttctgggagggtgaggcagaaagatggcttgagctcgggtgttgaaggctgcagtgagctctgattgtgccactgcactccagcctgggtgacagagtgagacactgtctctaaaaaatagaataataaaaatcagttgactatagatttgtggatttatttctgaactcatttaaaactattccattgatctatatatcactccttataccattaccacacagctttggttaccggtgctttgcaataagttttgaaatcaggaagtatgagttctccaactttgttcttccttttcaagattgttttggccattcggagtcccttgcaattccatataaattttaggatcagtttttttatttcttttttttttttttttgagacagagtctccctctattgcccaggctggagtgcagtggcgtggtcttggctcactgcaacctccatctcccaggttcaagcaattctcctgcctcagcctcccgagtagctgggattacaggcacacaccatccgcccaactaaattttgtatttttagtagagatggggtttcagcatgttggccaggctggtctcgaactcctgacccccaagtgatccgccggcctcggcctcccaaagtgctgggattacagacatgaaagcttttttatttttgaaaaaataaataaataaataaagacataagatgtctttccatttatttagggtctccttgttcttggaggtagattttctctgatctattttcattgagaccttgggccttaagagagccacaatttcatgagagattatttctctggagcccttcctacccttctcctatttcctgtctcctttcctcccttgttattcaaaagtcttaacaaatgctcctgggcccaatacagaggtcagctcacacttccagccttagctttggttcactttttgctttcttgccactggtagttttccctcctctcttaagaacttagctaagcttttcaaaggatgtttgcatttatccaacatttctagattttggtagctggagagttttaataattttctagattgctgttttactagattagaaaaagatagagctgggtgtagtggcacatgcctgtaatcccagctactccagaggctgaagtgggaggattgcttgagcctgggagttagaccaacctgggcaacatagtgagacctatctcaaaaaaaaaagtaagactttagggcgcagtgtaatcccagcacttttggagaccgaggcgggtggatctcgaggtcaggagttcaagacaagcctggccaagattgtgaaaccccgtttctactaaaaatacaaaacttagctgggcagagtggcaggcgcctgtaatcccagctactctggaggctgaagaagagaatcacttgaacccgggtggcagaggtttcagtgagccgagattgcaccactgcactccagcctgggcgatagagtgagactctgtctcaaaaaaaaaaaaaaaaaaaaagacagtgttttttaaagatggagtttagtatacagaaatattgggtgtcaggcaaagtattaattactttgtacgtattctcttttccttcttttttttaaaacgagacagggtgaccaggctaaactctgactgttgggctcaagtgatcctgccttagcctctggagtagctgggcattacaggcacatgccactgtgcccggctacatactcacttataaaactctatttttaaatgacagctcctctttacaaaatagatcaggagagcgattttcctgtctgcttcctgaggaagcaaaaaggcagaaacatggtgagcagcaagaccagtggttgccgtagtaagcatgggacttcctatgaatggctctgttaacagtaggggatggtaatgttctttgatttgtggactctgtttgatttgtggacaaggttttatttcctgtctttggggtaggagggtctgccatatccacaaattggctcttcccatttgttgtattcatttagttagaccatgattggaaagcctcactggctgtgcacattgcaccatacttaggaatatatgacggttatacatttcaaacagggctttaaaaccttccattcagctccttttggataaagctcttttcctcatgtggttgttgacatacatgaattataggctttgtttagctagtgggtaagagcagattttggagtcatgtacacctgggtttgagtttcagtcttgccatgtaccagttgtttgtggacaagttatttattaataactactctgtaccatagtttcttcattggtagtatcttcaaaatgaagtatctatttcctgtgctgttttgaaggtaaccttaaataatgtgcattgtacaatttgatacagtgtctgacacgtagtaaatactttaatatataatacctgtttttattctgatccttgttgagctgctgctttttgatgtgttgattatatataattggtaatcatccattttactgacatcttccaagatttgaccaagttgattgtctcaaatttccaagcagaaaaagtacccagaaaacagaaattaagcagttattaaagaatcgaatagcaatgatcattacgacttgtgcttaataagaaatgtgggccatgtctgcctgagcctttatttaatgcattttaaaatttgctgggttttttcctccctttaaaccttactatcaggttcagtaataagttaaactaaaaagaaacggatgccttagaataaagaaagattcaaattaataggatatataatggcctttcatggtggtggaatttctgtgtgttttgaactaagggaaagacttaaaggaagattgcctacagtgtactggacactttgctaggctctgtggatattatcaagacacagtccttaccctcaaggatctttttatttttcttttagagacgggatcttgccctgccacccaggctggagtgcagtagcaaaatcatagttcactgcaacctccactcactctcaaggatcttactctcagctgggggaggccataaacagttaaagtagcttactctcagctgggggaggccataaacagttaaagagttaatgattgactctagggctaagggaaagaaagtaattgggtcaactaggatttctagcttggcaagggggtagacctggattggcaaactacaacccaatgccagtttttgcatagcccacaaactacaaatgtttcttacatctttgagtggttggaaaaatatcaaaagaagaatactattttgtaacgtggaaattatataaaattaacatttacatgttcataaataaggttttattagaatatagctatgctgaaactacatatctatgactgcttttttgtcacaacagcagagatgagtaattgtgacaaaggctgtttggcctgcagagccaaacatttactgtgtggctctttacagaaaaagtttgctaactcaatgagtaggtggtaatttttatccattgaaacaagcaattaaggaagaacagatacaggagaagataacatttctgtgagtgttgattatttgaatcagaggtacttgtgaatatgcaggtctagaaggcaagggaatttataggtttggagtttggaaagagcttgaggctggaaatggatgtgggaggaaaggaggagatcaagaagactggatggaggagtgcaatttttagccctgtctgcacattggaatcacctgtagtgcttaaaaccaaacaaaaccagacagacatttccaggaacccaaccccaactccctctttcccaagattatgatgcacctgagctggacttgggcaccagaattttttgaaagctcccccagcaactctaatgtgcagccactggtacagagtgagaagattggaagatgggacaccaggaacaccaacatttaagggatagttctaggtgcttctgctgaggagaggaaattctgagggagtgatgatgggaattttagggtggtcagatcctgtaatttgagatcattgttgactgatgaatcaagagcagtttctgtagaggccaggtgagggtgtatgtcagaggcccctggtttgaggtgggagagtatgaactattgagaatattgaccgggaggaaaggggggaaagtgatggctgggatggggggcattgggaatgtagtttgttctagagaggtttttttaagatgttaaagccttgaggctatttatgtgctgagggagtgagtactcagaaagaaagcctggaatggcagtatcagatgccaccattcagttttcatgatggagtgaagggctagattttgaatagttcttggaataatcttaatattgtaacctttttggaactgtttgcttaatgtgctttcttcatttaggtgcattacattgtacctggaaagagaaatggacccaggcattgagaagcaaggccaacaactctgctttgcttgcccggttactgtcgttctgtctgggacattggtctcatctctgaaagcaggagggcaaactgaatgggctctgtagtctcttctaaaagtttttagtttaaactattaatagtacaactttgatttaacaaatgaggaagctgagcttacgagatgtctgtgaagcccattgtctgatcttttatttccttagtacctgggaatgcgcttttttttttttttttttttgaagaacaccaacagttgttcacccttccttgaatttgggtacactgtatatacagagtataccaatttagcctgccattagaacatgtcttcacgagcaaaatctagtataaagtcttactttaatattttctttattatgtataaataatagatggttgttatggaatactggatagtacaaaagtttagaatttttaacattttggtttatttattgggactcttttttccccccagtgattcttgtttctccaacaatgtgaatgcgcactccattcagtgtgaacgtgaatgttaatttatgtgccagctggattctacaggaagcagacacagatggggttggaggggcaaagggcttattagaggagtaatgcctgtgaagaaaaggggaacggaacatgtttgggtatagggagccatcagactgcagtgcacacctgacgaagtctctgcccacccagattgcctgatagaggaataccacaagaggtagaaatggctaggctcttgtactaccactttgcacagtcattgactagagatagatctttgatcaatgtagagattttcagccttggcattgttgacatttgggactggatactttgttatagggggttgtcctgtgatttgtaagatgcttagcagcatcctaggcctctatcccctagatgccagtagcccagcctccctgctattagttgtgacagtcaaaactatctttagacactgccatatgttccctagggaagggcctaatggtatataaacaaccctatggtggcatagtccaagttttgggacagggaggagtgttctatactacccttactggaaagacctatgagctattcagaaatctgaactatttaagatggagctttgttctgtggctcctggaattttaagcacacccctgtgaaacatcttgttaggatatactccactctccaaaacaatccataatgtttaaatagggctgttttattgattgattgattgattgattgagatggagtctcactctgttgcccaggctggagtacactgtcacgatctcggctcactgcaacctccccctcctgggttcaagcaattctcctgcctcagcctcccaagtaactgggattacagacacccaccaccgtgcctggctaatttttgtatttttggtagagacggggtttcaccatgttggccaggctggtctcgaactcctgacttctcaggtgatccgcctgcctcggcctcccaaagtgctgggattataggcatgagccaccgcacctggccttatttttctttttgagatggagtctgactttgtcgcctgagctggagtgcagtggcgcgatctgggctcactgcagcctctgcctcccgggttcaagcaattctacctcagcctcctgaacagctgagattagagatgcgtgccaccatgcccagctaatttttgtatttttagtagatgcaggatttcagcatgttggctaggctggtctcaaactcctgacctcaagtgatccacccacctcggcctcccaaagtgctgggattacaggcatgagccaccgctcctggctattttcttttgagactgggtctcattctgttcccaggctggagtgcagtggcacaatctcagctcactggaaactccaccttctgggctcaagcagtcctcccacctcagcctgctaagtagctgggattataggcatgtgccaccctgcctggctactttttgtggagatgggattttgcatgttgcctaggctgggcttgaattcctaagctagaacaatctgctcagggatgttgtatatttctaaaggtatttttccttttgttgcaggtgacacaactaaaaaaaaacaaaggtatttatggaattccactgagtggtaatggatgatgcagttcaaataactaaggtaagagaaataaaaccagaactgtgaggaggcttttgccagccaagtagtgtccttaaataaagctaacatcacatgctttcctgcttcatttcgtttctaagctgtaagagtagcttatttttttattattataaacattgtaattatcctttaagatacttcttaacctgattatgaatcagaatcacttgaagagctttttttttttaaaaaaaaagaccaaagtcaggctgggcatggtggatcacgcctgtaatcccagcactttgggaggccgaggcgggcagatcacttgaggtcaggagttcaagaccagcctggccaacatggtgaaaccccatctctaccaaaaatacaaaaattagccagatgtggtggcatgtgcctgtaatcccagctactcgggaggctgaagcaggaggatcccttgaacccaggagacagaggttgcagtgagctgagatcgcacactgcattccattctgggcaccaaagaatgaaactccttctcaaaaaaataaaaataaaaagaccaaagttaatgccctgccagcattgaattaaagcttcttgagtagatcacagatgatctccaagttttttaagtgggaatgtaaaccaactctatagttttagaaaactctttggcaatatctgcaaaacatacacgtatctaataacccaggaatttcaattctaggtatccacctttgagaaatgaaaaatatatgtctacacaaaagtgcacatacaaatgttcactgcagctttatgtattatagccagaaaaactgtaacccaatcaggtgtccaaaaacaggagaatagttaaacaaattgtgatatatggtcaggtgtggtggcttacacctgtaatctaagcacttgggaggctaaggcgggcagatcagttgaccagcctggtcaacatggtgaaaccccatctctactaaaattacaaaaatgagctgagtgtggtggctcacgcctgtaatcccagctactcaggaggctaagacaggagaatggcttgaagccaggaggcagaagttgcagtgaggtgagatcacgcccctgcactccatccaatctgggcaacagggcgagactatgtatcaacaacaacaaaaaattgacatacactattgataacatggaattttattcagtaatagaaaggaacaaactaccagtagacatgacaacatggatgaatctcgtagataaaaggttgagtgaaagaaaccagatggacaagaaaaagtagatgtagcagaattaccgagtaaaactaaactacagtgataaaggtcatatccctacttcctctgacaggaggtgggaggttgtgactggaaagaggtatgagagagcctctgcagcaccgaaaaggtgttttgttttgttttttgagactgagtcttgctatgtcaccaggctggagtgcagtggtgtgatctcagctcactgcaacctccgcttcctgggttcaagcaattctcctgcctcagcttcccaagtagctgggattacagacacgcgccaccacgcccagctaatttttgtatttttaatagagacagagtttcaccatgttggccaggatggtctcgattgcccaacctcatgatccgcctgcctctgcctcccaaagtgctgggattacaggcatgagccaccgcgcccggcctgaaaaggttttacatcttaatgtgttcatatacatacttttctcatggtaaaatatatataagattaaatttatcattttaactacttttaaagtatacaattcattggcattaagtacattcctgttgtgcagccatcaccactgtccatctccaaaactttttcatctccccaaactgaaactccatatccattaaacactaactccccatttcctcctcccccagctgctggcaaccattctaccttctgtctctatgaatttgactataatagttacctcgtataagtggaatcatatttgtcatttgacatctggtttgtttcacataggtttatttcacaaaggtatcttgtttatttcacataggatgaccttgttttcaagtcatccatgttgtagcatatatcagaatttacattttatggttgaataatattctgttgtatgtttataccactttatgtgtatccattcattcactgatggacacttgggctgcttccaccttttggctgttgtgactaatggtgctatgaacatgggtgtaggctgagtgtggtggctcacgcctgtaatcccagcactttgggaggccgaggcaggcggatcacttgaggtcaggagttcaagaccagcttggacaacatggcaaaaccccatttctaccaaaaatgcaaaaattagccaggcatggtgctgcatgcctgtaattcccagctacttgggaggctgaggcaggagaatcgcttgaacctaggaggtagaggttgcagtgagcccagatggtgctactgcactccagcctgggtgacagagtgaggctgtctcaattgaaaaaacaaaaacaaaaacaaaaaaaaacacatggatgtacaaacatctgttcgagtccctgcttttagttcttttgagtatattcttagaagtaaaattactggatcatatggtaactccatgtttcattttttgaggaatcaccatgctgtttttcacagtactgcatcattttatattcccaccagcaatgcacaagggcttcaatttctttacattctgctttttggtgacctccataattctaaattatatgtatatgctgtttcttcttaattcttttattaataaaaaagacaacataattctttgcctctccagtgtgaaaaaatgggaatttaccttacactatccccccatttaatatttgtattatttcctgttctgctgctgtttattagtttcctcagacttctgtaacaaaactccatgaactgggtggcttaaacaatagaaatttattgtctcagagttttggaggctagaagtcttgcgggctgtgcgggagaatctgttctatgattttcttctagcttctggtagcctcaggcatcccttacattgtagatggcattctctctgtatcttcagattgtcttccctctatgcatatctgtctcttgtgtccaaatttcctttttcaaaataagtgcgctagtcattggattagggaccaccctaatgagctcatctcaacttgatcatatgcaaaaatcctctttctaaataagttcacattcacaggaactgagtagggggttacaattttaacatcttttaggggacacaattcagtctgggtgacagaacaaatctctgtctcaaaaacaaaacaaaacaaacccataaagtgattacatttctaactttcggaagtactcttcaacctcctttttttaggttaattttcagcactctttccttctttcttcctttcctttttccttttccttttttttttttttttttttttttactttttatttttttgagacagagtcttggtctgtcgctcaggctggagtacagtggtgtgatcttggctcactgcaacctctgcctcctaggctgaagtgattttcctgcctcagcctcccaagtagctgggattacaggcacccgccaccacgcccggctaatttttgtatttttagtagagccaggttttcaccttgttggccaagctggtctcaaacttctggcctcaagtgatccgcccgcctcggcctcccaaagtgctgggattacaggcatatgccaccacacctggctaatttttgtatttttagtagagacagggtttcacctgttggatctcctgacctcatgatcgccctcctcagcctcccaaagtgctgggattacagtcgtgagtgccgcgcccacttaatatttatgttattatagctaagtaaatattgttcactgtcaggccaggcagcattttctgggtttttatttctttctctgtaggttcaatgtcatagaccctgggctattcaaatgagaaaatgaagaaaaagtgaattctctctctgaaactatcagttgcttccaatcatgtctttatattttatatttgaaccgtaactttctcataaaattttctccctggagtttctaattttcttgtctatttgcctgttattatagtttcacttttcaccaagatctcaatcatacactccagcctgtcaaggctagttcaaaccatacactgtggcccaaatttaggctagtcgtacactccaatccgagaccagtgggcactgttttttaggctgtctacacagtcatattggtattttccttactggtttttctttgacgggggtgcaggggaggttgggtccactgatcttggatatcagtctttctttgtatttgttttttaaatcttactagaggctagggggcatggtggctcatgcctgtaaccccagcactttgggaggctgaggcaggtggatcacttgaggccaggagttcaagaccagcctggccaacacggcaaaaccctgtctctactaaaaatacaaaaattagccaggcgtggtggtgggtgcctgtaatcctagctagtcgggaggctgaggcaggagaattgcttgaacccgggtggtggaggttgcagtgagccaagatcataccattgcactgcagcctaggcgacagagtgagactccatctcagtcaatcaatcagtcaatcaatctatcttaccagagttcattctcaagtcacttactgagagaaaaggtacctggcagataaattttgactctttctggtatccgttttttgttgttgttgttgttgttgtttgtttgttttggagacggagtctcgctctgttgcccaggctggagtgcagtggcgcgatcttggctcactgcaagcttcgcctcccaggttcatgccattctcctgcctcagcctcctaagtagctgggactataggcgcctgtcaccacgcctggctaattttttgtatttttagtagagatggagtttcactgtgttagctgatctgccctccttggcctcccaaagtgctgggattacaggcgtgagccaccgtacccagcctctggtgtctgtttttaagaccctcatgttggagtgatggtttggttgactatagaattctaggttgcctattatttttcctcaaaactttgaagtcattgctccatttcttctgacatcccttgttgttcatgagaaatagaaagtttcatataggaaattaatttttcttcttttctggaagcttttatgttctatatagtctggaattccatagaggtgtacttggtgggccccttaatagatctgcagactcatagctctccattttttggttcttttctgtcagcagctttctgatattgagcttcctgggttgttcatataatgttcttatctattctgtcctttttaaaaactctttgcttttggttgttttcctggagattgtcataactttatctcctaatctttttttctctctttttttttttttttttgagacagggtctcaccctgtggcccagactggagttcagtggtgccatcacagctcactgcagcctcgagctcccaggttcaagcaatcctcccacctcagctttccaagtagctggaactataggcatgcgctactacacccagctaattttttttatttttagtagtgacagggtctcactgtgttgccctggctggtctcaaactcctgagctcaagtgatccttctgcctctggggactacaggagtatgccaccacacctggctaatttttgtattttttagtagagacagggtttcaccatgttgccaggctggtcttgaactcctaggctcaagcgatccacctgcctcagcctcccaaagtgctgggattacaggtgtgagccaccacacctggcctgctgttttttcttttactgtttcttaaactagtcttctccccgctttcttttcctgtatgaacgttaatagttgaccacagcattggccctgtaatactcttttgttctttgtatttcttcagttttatttagcctctgttgtgtgttcacacattcctttttatttgcttgatgtgtgtcccatcccttcttttgaacactgtgtggtcattaatgagagtgtggtaggattttatgtactgatatttaagaaaatgaccataaaatgttcttggagatggtctttaaagaccgggcatggtagctcatgtttgtaatcttagtactttgggtggctgaggcaggaggattgcttgagctcaggagtttgagaccagcctgggaaacatggggagatcccatctctacaaaaaatgcacaaattacccaggcgtggtagtacatgcccgtggtcccagctattccagagcctgaagtgggaggattgcttgagcccaggagctcgaggctgcagtaagccatgtttgcaccactgcactccagcctgagtaacagaacaagaccctgtctcaaagaaaggaaaaaaaaattttaagtagttgattaaaagaggtctttagggtgggctctaatttgatgtgactggtgtccttgtaagaaaaggaaatttgtacacgcagacatcagaaacaaatacacagaggaatgaccaggtgaggatacagtaagatggtggccatctgcaggccaaggagagaggtctcataggaaaccaaacttgctgacactttcatcttggacttctagcctgtacagctgtgagaaaataaatttctgttgttgaacccaccgagtctgtgatacttttatggcagccctaccaaatgaatatagacatttaagaaggcttggtgcattgcagcatttggtaaattattatgcatttcgttgtattgtgcatgtagtgccattactgagaatagcaggatggatgggaagcatcgagacaaagtaaaatacgagctggccactaacatatggtatgattttgtggtaggtgaaaaaaggattccagaagtagagtgcttatgaaagaaaagctcagtagtgtaagaattttacaccagtttgactttaacagagagtgagttcaacagtgaaagatgaggttgcaaatgtagtttggggacccatattaatttcctggtgctgcccaaacaaagtaccataaactcggtggctaaagacagcagaaatatattgtctggcagttctggaggcccaaagtcaaggtgttggcagtgttggttccttcttggggggaatctgtcccatgcatctctccttagcttccaagagccccctgtgttatttggattgtaaatgatcactcaaatcctctttcttcaattggcattttccctgtctgttttcacatgattatcttcttataaggacaccagtcatattggattaggggcccacagtactccagaatgacctcatctttatttaactaattacatcttcaacgaccctatttccaaataaggtcacatcctatggtactggggattaggacttcatatcttttttggggaggcatagttcaacccataacaggggccaaactgtgaagcatttcctatatatcaatccagatattttcaaatctattgtttattcagtgggaaaccattgaaaactttgagcaggatgaatctaacactttaggaagactccttggggatggggttggagagatgttagctgcactggaagtcagtagaccagagtctggaccactgggagtctggaccagatcaatgttatggaaaaccaggattctggggctcccactcaagatatcccaaacccaaatcttcagactggagacccaggactgttttttaaaagctccctctctctccctgtgagtcagatgatttagcctagcttggatgtaacactgggtgtgaggtgatagaggcatgaaatgggttggtggttatgcaagtagaaagaccagagagaacctgggaaaagagacatttcgaaaaagtagtatgtaaactggcaccggagagtctgagacagtggtggaatccttaacagaaataaagatgtctagagaataaattgggtttaaagggaaggtaattaatttggtttacagtgtaaggtgatagacagtcagcaggcacttggagaatggtgatgtatgttcagaagtgagataatggaggtgataatcaaaaccctttgttttgatttgagcctttgtgtgggagaaaggatatggcgagaagaacagaagatcaggaagccaatactgtagaccctcattccctagcccctgaaacaaatggatttgacttctctgtcatgacacctggaacaaatgtggcattgcttacttacttcctttgccatgaactcagtgaaggcagggacgggtcttggcttgtgtgtgtgtgtgtgtgtgtgtgtgtgtaagagactgggtctcattctgttacccaggcatgagtgccatggcataatcatagctcactgcagcctcaaacgaacctcctccctcaggcctcctgagttgctgggactacaggcatgcaccaatggccctggctttttaaaggccatcatctagcacagtgcctggcttttcaatggaagtctgttgaatgactgactgactgaccgacttggaaaatgaacacatcaacttgagaataagaactttaacttttttcttccttgcatcccctaacatttaatccaatgcctggtccttaataggacccaaataaaattttgatgtgtgaatggtagaagaaaagctaaaattgagtagtcattgtgtcaaagagaaccaggaaacagagaagcttttgagaataagttgaccataacatgtcaaatgcaagtcaaggagaatgaaaactgagggcaggaattagatttaatcaggaggttatttgtagatttgagaacgaaggatttaagaacataatgaggttgttaagggagaatgaaggaattaagatcataatgaggttgttaagtagaggtggaaagtgaggaaatgaaagccaagtacatcttatacaagtttagtagtaatgaggaaaagagaagctcatagagttaaagctctaaaaatctgtttagaacatccgtgtctatttgtaaacaaaggggtatgagggttagggatggaaaaatggaaagtaccagaaggaaatgcataattttaggggaaagatctcaaatgggatcaagaacatgggcagtagccttaaaaaggatgagggaatctcttcctctagtctaaaaagggagaatagaggctctatagaggagagagaggtcatgtcctcttgtcagccatctgctcagagggagcttgggctgctgtgctagaaactgacataggaaactgacaaaggaaggatatgttttctgcacagcactgaggagtgtgatactcctaagcagtagttggcagcctgagataggaatggtggaaccagatggtaagtataatccaggaatcaggatggcactttctgtagattagggagttgtaggctgggggtgtacttttattcactcttctctgattcagaggttttataattttcactaacatcattaaaaacaatattggatgcctactacctgttggtttttattttaatcttgggaaaaaaaagtaaaagctactatcctgaggtttctggttttattggggagatagatcatatatgtaaaaagcaagtttagcaaatggcacatggcattatagactaagtcccaaatcagtagattacataaatgtcagagagattacaattatagcagtacactttgaggttcttttccccttagcttatgaacatttaaattttgtcacttttataaatacatgcctatttgagaggtaagaaaagtaccatgttgctttaatttgcttttctttgttagcaaagatgaattttttcagttgtttatcattattttactttttatgaattgcctattcatagcttttatccatctttccatggttgtgtttgtacttactaatttgtaaatacctcatttaataaggttatttaaccttttgcctgtaacattttgcaaatgttttttctagcttgttttttggggttctttcttttggttggttggttggttggttggttggttgggttttttttttgagacagatcatcactctgttacccaggctggaatgcagtggtgccatctctgctcactgcaacctccaccttctggggtcaaatgattcttgtgtctcagcctcccaagtagctgggattacaggcgcacgccaccacgcccagctaatttttataatttttgtagagatggggtttcacgatgttggctagggtggtctcaaaactcctgacctcaagtgatttgcctccctcagcctcccaaagtgctgggattacagatgcagccaccatggccagccttttctagtttttttaatttaaacattttctttcagatttcttattttgatttattttcagtttatgatgttttgttgacacataagagtttaaatatcttatgtattagaaactattaaatatttctttttaatatttaggaaggctacctcagcctgagaacagacaaatattttcaaatgttttcttcaaattgttttatagtttattggtacttatttacattccattgtattattgttatttatatacttaaaactttaaaccattttggaatattgcatgaaatagagacctaatttttgctgagtagttcagcagtttctagtactgtttactaaataatctatgaaaattttctgcggattcctaaatgattttgtccaggctggagtacagtggcacaatcatggctcactgcggcatctacctccccaggctcaggtgattgtcccacctcagcctctcaagtagctgggactacagaagtgccactacacccagctaatttttgcatttttttgtagagactatatttcaccatgttgctgagcctggtcttgaactcctgggctcaagcgacctgcccacttcggcctcccaaagtactaggattacaaggcatgagccaccgggtattttttatcatattcccaatacttatgtatacagacttccttgtttataaatctgtatctgtaccattgccacatattattgtattaatataatctcatagtgcaaatacttgttcattatttgttttaaataatgcctagactacactcacctatttgtatatgtgaactttttttaaaacattttattttttaataatttaagactcagaaagctgcagtagtacaggttcccaggtatgcttcacccaagggctttcaattagaacctttttttttttttttttttttgagatggagtctcgctctgtcaccaggctggagtgcagtggcgccatctcagcacactgcaacctctgactccctgattcgagcaattctcctgtctcagcctcccgagtagctggaattacaggcatacgccaccacacccagctaatttttgtatttttagtcaagacggtgtttcgccatgttggtcaggctgatctcaaactcctgacctcaggtgatctgcttgccttagcctcccaaagtgctgggattagagtggtgagccactgtgcccggcccctgaaatcaccttttctgtaatgctactttgttcaataaaaataacatattaatatcctttttaaaaatacatacaatatattgttattaactgtagtcaccatgatgtacaatagatctcttgaacttattcctcctaactgaattttgtgtcctttgttcagtatttccccaattcccctacccaccaacctctagtaaccaccattttactctctatttctatgaattcaactttttacattccacgtgtaagtgagatcatgtgatatttgtctttctatgtctggcttatttcgtttaacataatgtcctccaggtttatccatgttatcacaaatgacagaatttattctttttttaaggctgaatagtgttccattgtgtatgtatgccacattttctttcaccattcatccatcaatgaatgaaaacacttaggttgatttcatatcttagctattgtgaataatgctgcaatgaacatagtagtacagatatctcttcaacatacccatattagttatatcctttagatatatatccaatagggggaattactgaatcatatagtagttctatttaaatttttttttgttttttaattttgtttgtttagagacagggtctcgctgtgtctccaaggctgtagcacagttctgcaatcataactcactgtaagctcaagtgatctacttcagcttcgctactacaggcacatgccactatagtcagctaatttttaaaaattgtttgtagagtccaggtgtggtggctcacgcctgtaatcccagcaatttgggaggcctaggcgggtggatcacctgaagtcaggagtttgacactagcctgactgccatggtaaaaccccatctctactaaaaatacaaaaaaattagccgggcgtggctgtgcatgcctatgatcccagctacttgggaggctgagaggcaggagaatcacttgaacccgggaggcagaggttgcagtaagccaagatctcgccattgcactccagcctgggcgacaagagtgaaaatccaactcaaaaaaaaaaaaaatcgtttgtagagacagggtctcacaatattgaccagtctggtctcaaactcctggcttcaggcagtcttcctgtcttggcctcccaaagtgctgacattatagccatgagcccctgcacccagccttatttttaattttttgaggaacctccatacatgttttccataatggctgtacttatttaccttctcaccttattgtataatggtgcatatctcagaatgtgtccttactgagtgacacataactatatttgaagtaagtttcttatagatagcatatagttgggtcttttcttttctttttttaatagagacagggtcttgctatgttgcccaggctggttttgaactcctgggctcaagcagtatgcctgcctgggcctcccaaagtgttggtattataggcatgagccaccatgcctggcctaggtcttttttttttgagacagggtctcacttttgtcacccaagctggagtgccgtggtgcaatcatggctcactgcagcctcaacctcctaggctcaatcagccctccacctcagcctcctgagtagctgggattacagatgcatgccatcatgcctggctaatttttgttttgtttggggtttttttggtagagacagggttttgccatgttgcccaggctggtctcgaagtcttgggctgaagtgatccacctaccttggtctcccaaagtgctgggattacaagcgtaaaccattacacgtggtctagttgggttcttttttaaaagaatcagttctactaatttcttttcgttggtatgtataaaccatttatatttaatataattattgatactttggatttaaatttgccatttttgtttcattcattatttttgttcttctgtttcccctttcctgttttacagtgggttccttgaacattttttaatatttcattttgagtgtatctctttataaagttttttgtgtgattgctctaggaatatatatgtagataacttattacagtctattaatatcaactttttaccaccttaagtagaatgtagttagttttagtagaaggaatcttttagttccttctacctttcttcttctttttttttttttttgagacggagtcttgctctgtcatcaggttggagtgcagtggcgtgatctcagctcattgcaatctccacctcccgggttcaagccattctcctgcctcagcccctccgagtagctgggattacaggtgcatgccaccacacccagctaatttttgtatttttagtagagatgaggtttcaccatgttggccaggatggtctcgatttcctgacctcgtgatctgccggcctcagcctcccaaagtgctgggattacaggcatgagccattgtgcctggcacaccttccttctttatggtacagttgtcttaaatattacctctacatacaaggagaaccacttcagggactgctataatttttactttcaaccatcaaacataatctttaaaactcaagagaagaattgcttaattagtgtatgtatgtgtgtctgtatatgaataaacatatatatatgcataacatatatatggatatatgcatatatagacacacacacaccctttccattgctttttctttacttctatttgaggttttcttctgttatcatttacttcctttctgatagagtttctttagccattcttttcaaagctgatctgttggtgacacatttttagttttgttcatctgccagtatttgtatttcatttttatttctgaaggatattttcactgtctatagaattttagcttgatagttattttctttcagcatttgaaaaatattgtatccatccttgtggtttccatggttcctgatgaaaaatctgttgtctttcaaattgttattctcctatgagtgatatgttgtttctctctaattgatttcaggacttttctttagtttttagaagtttgattctgtaagtttatatctaaatctgaggctgagtgtggtggctcatgcccataatcccaacactttgagaggccaaggtaagaggatttcgtgagtccaggagtttgagaccagcctggacaacatagtgagaccccacctctaaaacagatagatagatagttgattttgtttttgttttttcctttttttgagacggagtcttgctgtgtcacccaggctggagggcagtggctcgatcttggttcactacaacctccgcctcctgggttcaagcaattctcctgcgtcagccacccaagtagctgggattacaggcacccgccaccacacccaactcattttttgtatttttagtacagatggggtttcaccatgttggccaagctggtctcgaactcctgacctcaggtgatccccctgcctcagcctcccaaaatgctgggattacagatgcgagccaccgtacccagtagacagtttttagccattatttcttaaatttttttttttcatctctccattcattctcttactcttgggaccctgatagcatgaatgttagatctttgttattatcccacaggactttgaaactgtgttcatttcttttcaatctactttctctcttgtacagactggatgatttccattcatttaagtttactaattgtttcctttatcatttttcttttgctgttgagcccatccagtgggtctttttaatttcagaaattttatttttaaaaattccatttggtactccttatgtcttctatatgctgagtgtttataatgtcttgtttgagcagtttcatgagcgctgttttaaattcttttcaaataattccaaaatctatattatcttggtattgtcatctgttgattgccttttttcattcaagttgagattttcatgttcctggtataatgagtaatgttggattgcatcctagcacttggaatattgtgctatgagattctggttcctgtttaaatttttatatttaacagtcaacctgtttaggtttagaacacataccctgtcccacttttgtcgactgtggttcagttttcagtcttgttttactcttatggtctgtgctaccgaaaggccagtctgaaatttaggtgttattccggagcagtgttcagttcttatgccttttgctgtgttgtttctggtcatttttacacatgggttgctcagaggcacttttaggatttcatacacagattcagagaattcatttctctagctctctcctcaccataatcctttcccaattctgtagttttgctgggattaggactccatctggttattccagggtagagaaagatgagttcacccacattctctgcagctgtaacatggagaagaggggaaaggcgtgccacctcattatggcagagttgtgttggaaggcagaatgctgttcacaatttctgggccacagtgtctggtgaggaaaaggaggggtacctcctccccttttttagtttgcctggtcaaaatgtttttgtctgctgagctgcccctttcccagttctttacctagagagggcaggcttttcttggcactttcttgtctgtgcttactggatctttcagattgtggcttcagagcttgggctaggacatattagaagttaaaccaaaccaaacaaaaaagtagggagcttcctgttgggtcagtcctcatgtcccctggtccctagccaatctaccttcttttttctacttttcagaatttttctgtcacttgtgtcatgaatttcatctagaatgttcggttataatcggtgggaagggctgggcgcggtggctgacgcctacaatcccagcactttgggaggccaaggcgagcggatcacctgaggtgaggagttcgagaccagcctggccaacatggtgaaaccccgtctctactaaaaatacaaaaaaaattagccgggcatggtgggggacgcctgtaatcccagctacttgggaggctcagataggagaatcgtttgaacccaggaggtggaggttgcagtgagctgagatcgcgccactgcgctccagcctgggcaagaagagcaaaactccatctcaaacaaaaacaaaaacaaaaacaaatcagtgggaggaatagggtggaatatgcttactccatcttttcctgaactgtaaatccctgctgcaattttaaattatgaactttagttccagtagttttttttaacctatgtacgtagtctttcaaatacaaataacagttaaggggttttcccccaataattatatcttgttttcttttcttttcttttttttttttttaaagagaccgggtctcgctgtatcgcctaggctggacttgaactcctgtgctcaggcaatcctcctccctcagccttccaagtatctgggactacaggcatatacccccatacctagctgttttcttatcccattatctacttttagaacaaggattggcaaactataatctgtttcccatatccagctcactgcttattttggtatggcagacaagctcagaataggttttccttttttttggagacaggtctcactttgtcactgaggctggagtgcattggtgtaaacacagctcacttcagcctcgacctcccaggctcatgggatcctcctgtctcagagagaaaaagagagagagaaaaaaagaaattatatgaaattcaaatttcagcgttttattagaatatgccatgttcatttgtttatatattgtctgtggctgccttcatggtacgacagcagagttgagtagttgaagcagagacttaattgccagccctttttccagatgatttgtaaatcctagaagtgaaaccattgtccctttcttgtcctgctttagtgatactgatatttcaagatacataattttcttgggtgaaagtttcttttgtttctggtttctaggtatttgtgagatatttctctcacaaaacgtgttcttttcttctggtttttttttgggggttttttttgtttctttggttttttgagacagtctcgctctgtcacccaggctggagttcagtggcgcgatctcaactcactgcaacctctgcctcctgggttcaagcagttctcctgcctcggcctccctagtagctgggattacaggtgcctgcaatcacgccaggctaatttttgtatttttagtagagatggggtttcaccatgttggccaggctggtcttgaactcctgacctcaggtgatctgccctccttggcctcccaaagtgctgggattacaggcatgagccactacgccttgtctcttttcctctgttatctgacttactggatggcatctgttaggtaaatcagaaaccaaagaggagtagcattcagcactccctgtcaccccaagagcaaatctattatcacaccctgtgcagtttacttcctgaatatctccttccttgtaacacttttgtgtctccaccagtaacttctaactggactgtccacatccagtgctatattctctacacccagctaaatgaagtgttcattccaaaatgcagggcagggaggtcactgtcatgcttctgttcttcaaaggcttcttaatgcttatgggacaaagaaaaatcacccttgtgtggccctaccctgtatacatctccagcttcctggcacctgctcccccttactctttatacttcagacacggtggcttctttcagaccctgctcctgccctttctgaggttacggactggcatggagttccctgccctccttaatgcctccctgattcctgttcatcttctacttgtcagctcaggaatcagtgccttagggaggccttggctgagctccctgactaggtcaaattttcttcttctataggctcttagagtcctataattctcttttccatcacttctcctatttgtctgtgaggtgatttgtttaatgtcagttttctgctactagactgtaagcttcatgaagatagggattctgttagaatttgttcactatttctagtagaaggaacagggcctagcacatagtaaatactgagtaagcgggttatttccccaatgattgcctttttaaagaaaaccagttctgtaaaccagcattcatcaggcttatcatatggctttttatattttgaattatttttgtgaggatttttattaatatgttttccaataatggaccatggttaaatttttgaagtaagccttacttgatcaggttgtggtataattataacatatgctgctttttctttgctaggattttaagattttgcagttaaagttattttcttttttgtgtgctttgtcagattttgacatcagtgttatactagtattttcatggcttattttattccattcttttattttcaacttttctatatccttaagcttaaaaatgtctcttttaaacagcatataattgagggcttttattattaggctttataatttttgtattttaattggaacatttagtttgtttaatatagttaatatattctttgctttctattttcctcaaagatttgaatagaacaaaaggctgacctcccccaagcaagagggaattctctggcagtctgcctttgcacttgaaatgcaactcctccctgaatctccagcctgccagcctcttctattatgagtcaattccttaaaataattctatatgatatatatttaatataattaatatataatgtggctactacctagtagaattaatgtatacttaatatgacatataatataattacagtagtaccttcttatctgggggaagcattatattccaagacccccagtggatgcctaaaaccacagatatatattttcctatacatacatagctgtgataaagtttaatttataaattaggcacagtaaaaaattaacaataactaataataaaatacaatacttataataatatgccagcatgttcctttttctcttttttcttgctttttggattgatagacttttttactatcctagcttttttccctcttgccaagttatagaccctgttcttttagtggttaccctacagattacaacacatagcctgcatgtataggaatgaaatacagtttacgtagggttcagtaccatctgtggtttcaggcatctactgggagtcttggaacatatccccccaccccccccccagataagggggtagtactgaaattatattaaatatatgcttattatattaaatattagtcatatattacatacatattatatagatttattttaagggattgattcacagtgggggaggctagcaggctggagacccaggaaggaactgcacttcaagttcaagggtagtctgctggagaattccctcttgcgtggggaaggtcagccttttgtgctattcagaccttcagttgtatggatgaagcccacctacattatggagggcaaccttctgtactcaagagtccattgatttaaatgtaaatctcatccaaaaaaacccctcacagaaatatccagaataacctttaaccaaatatctggacactgtggtgtggcccaaccaaattaacaatcacaagtctactctttatcaacttggcacccatacacatctccttaaaccattattaatctccaaataaagacagtaacaaagtcatacttctgcttagcatgaaagaactatcttgcatgtagccgaaaacacactattcctttctctaaaagaggatgcagattatttggttgatgtttactcttcttgatatcctgcaacttaaattctaaagtttaagaaaaagttaatacttaagtattatgatcagctgttaatctaattttttttgacgaaaatattttcgtatccattttctattgctgcctagcaaaacatccccaaatttaatattttaaagcaacaaccatcaaaaattggctcacaattctgtgaatatcaatcaatgctgggtagctgtttggttcctctactggtcttttttttttttttttttttagacagggtctcactctgccacccaggctggagtgcagtggcatgatctcggctcactgtaacctccgcctcccaggctcaagcaattgtcctgtctcaaccttctgagtagctgggattacagacacacaccactaccacctggctaatttttttatttttagtagatatagggtttcaccatgttggccaggctggtctcgaactcctcacctcaaatgatccacctgcctcggcctcccaaagtgctgggattacaggcgtgagccaccatgcctggcccctctgctggtcttgattgaagtcattcatgcaactgtaatcatctaatggttcatctgggactgagattgtctcaagcacatgtctggcagttggtgtcacttgttgattgggcctctctcttaacgtaaggaagtgagccaaagcttctcacattatgacagcagtgttcccatagagccaaatgacagctgtaagttctcttgaggtatcaacttggaagacacaccattacttctgcattttattggtttaagcaagtcacagggccaactcaaattaaaggaatggagaaataaacttcacctgttgataggagtggcagtgtctcactgtaaaaggcatgtgtacaaggatgggattttacgtagccatctttgcaaacagtctaccacagtgtcttttttcctttcgagtgcttaaaaaaattgtttttaaataattatttggttttcagaaatttcactattgtgtatctagacacagatttcctttttatttatctgtttggggggtgtttagggcttcttggatctgtggtttgatgtttttcctcagttttggagaattttcagccttcgtctgttcttcgaatatttcttctgttccatttctccctttccgcttttctgaaactgaaattacatgtaggttagatcatttcattgtatcctttatacctcttaccttctctttggtatttttttataaatctttttgcttctctctgcttcattctagatacttccttttgacctatttaccagctcactaattctctcttcaggtatattttacctgttcttaaatttatccattaagatctttttttcagatctgctattacatttttataccattcttgactaaaattcttaatgctacaggactgttcttcttgtctgtttcttactgattctcatgttgcctttttatggactagacactgtagttttaaaattatttatagaaatgacctgagacctatgatatatttttcaagagaggatttacgtttgtttctagctttgcctaggagtcttcaatcattttaattcagtttcagggactgatttgcttttaagcagggctgtagtccctacaggggtggtcaacttcatttcactacctaatatacctattatgtgtggagtactttgctagatgttgggtaggtcttgtgagcagagcagacctctctttggtctgtatggagcacggagcttgattataattggcaggtgtgtgtgtgtgtgtgtgtgtgtgtgtgtaaataaataaatatttatttatttatttattataggccgggtacagtggcttacacctgtaatcccagcactttatgaagtcaaggcaggtggatcacttgaggtcaggagtttgaggccagccttgccaacatggtgaaaccctgtctcttctgaaaatacaaaaattagccagacgtggtggcaggtgcctgtaatcccagctactcgagaggctgcggcatgacagtcactcaagcccgggaggtagaggttgcagtgagctgagattgtgccactgtaatccagcctgggtgacagagtgagactccatctcaatatatatatgcgtgtgtgtatatatatatatctatatctttaagatagatatatttatatagctaagtaattaataaatatattaagttctatgaaagcaatgagtaggctgctatggttgtgaatatttggactacacaggggataagaatgggtctaccataattagcagggacaggttttgtttaagccaaaaactaagagggcttagaacagaaaccgccaggcagaagcagttaccagtgtgaagactagatgacaaccaaaaaagtatgtgggaggagggaggggaggttgcgcagtggggagttgagattgacttagaactgtattaatgagctttccccccaacccccatttttctcccatttaccttcagaaaaattagtgatttggctaccagtgaatctaggctccaggtgtagctctgtagttttggactagttacctaattcttcattcacaacaaaacagaaggagagaggaaaaagagagcaaacatggaattgggatgggaagtaagagagcacatgaggagagagactatgtcaagtttcttcgtattccttttttaattacagaagaaaagatgggataaaaatattccatcttatttctctgtttaaaagaaagagtaggccgggcatggtggctcacacctgtaatcccagcactttgggaggctgaggcaggcggatcacaaggtcaggagtttgacaccagcctgaccaacatggtgaaaccccatctctactaaaattacaaaaattagccgggcgtggtggcgcatgcctgtaatcccagctacttgggaggctgaggcaggagaatcgcttgaacccgggaggcagaggttgcagtgagccgagatcacgccactgcactccagcctgggcaacagagcgagactccttctcagaaaaaaaaaaaataataataataaaataaataaaagaaagagtaaatgaatcaaaatgaagagaagccattttatctgcctcctggatgaagagtttcattgatgaacctgaaatgttttggttaacatgagaaaggagggtgagaagatgcctgagatgtgagctccttgaggacaggagctgctttctctctccagcctggcacaagacaaggaacttagttgaatgaatgagcaaataagtggttctctgctttgaaggaacttggactgtcattaccttgcaaatcaggtttaccatttatttgctttatataagttccagaaagaaactatttcctctcataatattactaccctaaacttctggtctgatctatggattgtagagcttaaatttcctcaaaccccaacagtcagagattgttacaccaagataaatagcatatttctcagcgccttgtattttctgtctttggccacagaccttaggacttaggctgatatttgagaaggaaaaactggaatttagtagaattatacttcctgtatcttaattttccaactcttatataaggtttgctttttctagagagagactaatctggaatgagaatgaattctcatcagtaaaggcaaagctttaagtgggtcatctgactttgcttttgtgctctacattcaccctgctcataaaaggtcctttcatgagttttctaggctttcatcactgccagcgtctccacaggcattgtgaaagtattaaacttcctaccctcccccatgcttgtctcatggactctttcgtagagtgcacagtggactgtgtttagctcagcaggaactctttgcaaacactgaatacatgaacaacccccctggaaagataagagatttcagtattgcttggtgtcatagccgcagaagttagtgtctgccagtatctgatgaatatggtgacttgcagcctaatttttgtgaaattatgaggccaaagtttaagaagtgttcatgttaaagttacttatatataaaatttgcctatcgataatttctgtcaataggaggttgatgaatgcttcacataacctagatactcctaattaactgttttttatttctttttttctaggacacatgttcaaagagcataattaactttttaaaagaagctagtaagtactgaaatagttttttaagttttttctacaagaatagaggaagaaaggaaacatggaattctgaagggctacttagcaagctgcttatggcataatctggggtgggggtgcatagtaaaggatttgcattttactgagaccgatacatgtcaagggaatggtatttaaaattagtgatatgtgttgatttttcaaggactatagcccatcaactacaataggctccaaaaaattctggtgaaattagcttcttggagccttccagtttacctactatgttattcccactataaaatattctcaacttttggggttttagccacttaagttttttattttctctaatgtctctagtatctgctttagtttcctgtcaatgctagactctgtggttcagcagttcatccattctcttcccagtactcaacctcgttgcttatagtttcattacattcatctagcaaaaccttaattctgtatgtttgccataccattagtgcttagagcattttttcagaaaagaatcctggaaaaatggatcttatctcacctgggccctcaggactgctgggctgcctggtgtcagcacttcccgccattttctatagcaccagtattattcttaatactttaaaaaaccaccaggcacggtggctcacgcctggaatcccagcactttgggaggccaaggtgggcggatcacaaggtcaggagatcaagaccatcctggctaacacagtgaaaccctgtctgtactaaaaatagaaaaaaattagctgggcgtggtggcgggcacctgtagtcccagctgctggggaggctgaggcaggagaatggcgtgaacccgggaggcggagcttgcagtgagccgagattgcaccactgcactccagcctgggtgacagagcgagactccgtctcaaaaaaaaaaagtaaataaaaataaaaaaccatatcccactatctcccccttctctctttgcctgtgatcttgctgcatacttatggggaaatctttaagatgtcagatttcagttctctcacttttctacaacttctcccacttttgcctttcttatgtaccttcccttccttcccatctgattccttatcagtatttacacatgattagttcttgcctaacctaatagaccctttcttgagtgcaaatcagtggctatttttgctagggtataaaaattacctatctaatcaccttgacaaagttaccctgttatttccaataacttacttcctatggattcttgtagattttcttttttttttttttaatttttttattttcagatgttttctcgctttgtcaccatgcctggcctaaattctcgtaggttttctatgtaaacaatcagattttctgcaagtattagtctcctttctaattgttataattttaatttctttttctttttaaaatttttcgtagagacaaggttttgctatgttgtccagcctggtcttgaactcctgggctcaagcaatcctcccatctcagcctcccaaagtgccattacagtggcatgagccactgtgcctggccaaatttcttttcttgttgcgaaggcagacttttcatacaatactgaatagaagtgatagtagattactttatttctgattttcaaaggaatgctttccgtttctctctgttgaagataattgcgtattgtttttttttttaaatagtaacttttatcaggttaaggaaggtttcttctatttctatttaaaaggattttttaaaatcttgaattcatatgtttttatctaatgcattttctacatcagttgaaatggttgtatgaactcttttaatatgggtgaattatatttatagattttatgttaaaatatccttgtatatcttggataaactcaactggatcatgatttatcttttttatatgctagattcaatttgttgatactttgttatgatttttgaatatatattattgtgtaaaagtgagcctgtgattttctttcttgtaatgtttctgtccagttttggtgcctggttttgctctctccttagaatgagctgggaactagtcactcttgttttctcacctataatagcatctgggtccagtgttttttatgtgggacaaatttgaacttgtggtcaacctctttaattgtaagaatattcaggtcttttgttcttcctgggctagttttttattctttttctagagattcgttcatttttcttagttttatttgcctataattgtggataatctgttttttatctgctacttctgtaattatttccacatttgatttataatattaacttgtgggccaggcgtcgtggctcacacctgtaatcccagcactttgggaggccgaggcgggcggatcacgaggtcaagagatcgagaccatcctggccatcatggtgaaaccccgtctctactaaaaatacaaaaaaaaaaattagccgggcgtggtggcaggcacctgtagtcccagctactcagaaggctgaggcaggagaatggcgtgaacccaggaggcggaggttgcagtgagccgagatcgcaccactgcactccagcctgggcgacagagcgagactccatctcaaaaaaaaaaaaaatttacttgtgtcttctctttttacctgtttgttaatttatcaaataactacttttggctttgtttcatttttattatacaataaaatgaaattcttttcattgtatttcttttcattgattattcctataattcttaaacaactttataattgatgtaacaataacctgtacacatttaaagtgtaaaatttattacattttgatccatgtatatagcagggaaatatcaccacaacaagagtgtgaacatataatctctccccaaagttttcttgtgtcttttataatcactgcctcttgcccctgcccactccctcatccttaagcaaccattggtctgttttctgccactatagattagattgtattttctagagttttatacaagtgaaatcatgtagtatagtattaaccatgtgtttgtttgtttgtttgtttctttctttctttcttttttttttagacggagtctcgctttgtcacccaggctaaagtgcagtggggcgatctcggcttactgccagctccgactccggggttcacaccattctcctacctctgcctcccgagtagctgggactccaggcgtgcccgccaccacgcccagctagtttttgtatttttagtagagacggggtttcaccatgttagccaggatggtctcgatctcctgacctcgtgatccgcccacctcagcctcccaaagcgctgggattacaggcaggagccactgcgcccagcaactatgtgtttctgatcctttgtcagggctagccaattcctagagacagtgaataactcactcataatctagctgcctcctttatgtcgctctcataggactttgacacctctctgctacaatccacctgccctgttcatttcaagatcaggtaccaggaaactcgggacatccctatgctgcagaactcactgaaattattcaaactagccagtcctaaacatgcttaccctgccttgcccattccttccgctgaaaccacataaaggctcttgcccatgttttcatcccattccattgacctccttactgaccctagctagtgcttcctcatgtggcccctgcatggcatggtgtgcaccttcctcttcggaactgcgagtaactgtcttgtcagcggcaatcatcttgtgatctgttggcctcatcatatttgaataacaataaaatctgttttaaggctgggcgcggtggctcatgcctgtaatcccagcactttgggaggccaaggcaggcggatcacgaggtcaagagattgaggtgaaaccccctctctactaaaagtagaaaaattagctgggcatggtggtgcgtgcctgtaatcccagctactcaggagactgaggcagggaatctcttgaacccaggaggcagaggttgcggtgagccaagattgcaccacggcactccagcctggtgacagagcgagactccatctcaaaaaaagaaaaaaaaaaaactgtcaaatgatactccaaaatggttgtaccattttatatttgcaacaacaatgtctgagggtactgattgctccatatccttgacagcacttggtatagctgatcttttaattttagtcactttagtgggcatatactggtattttatgttttactttttattttcctaatgattaatagtttgcagcatctttcatgtgcttatttccctttcatatatcttctttgataaaaatatctgttcaaatattttgcccattattttgttggaatacttattttcttactgttgagctttgagagttctttatatatctggataccaatcctttgtcagatatattttttgcaaaattttttcccagcctgtgatttagtttgttattctcatgtcttttaaaaaaaattgtagttaaaatatacacataatacaaaatttaacattttaactctttgtaagtatacagttttgtggtattaagcatagtcacattgttgtgcaaccatcaccgccatccatctctggaactttttcatcctccctgactgaaattctgtacccatttaaacactaacttctcattcccccttactccagcccctggcaaccatcgttctgttttccttctctatgagtttgactgctctaagtacttcatataagtggagtcatacaatattttcattttgtgactggcttattagtataatgtcttcaagtttcatccatgtggtagcatgtgtcagaatttccttcctttttaaggctaacattccatcctatgtatataccacattttatccattcatctgttgatggacatttaagttgcttcctccttttggctattgtgaataatgctgctgtgaatgttgttgtataaatatctgttcgagttcctgctttcaattcttttgagtatgttcccaaaagtagaattgctgggtcatatgttaatactgtatttagttttttgaggaattgccatactgatttctatagtagtggtaccatttacattccaaccagcagtgttcagggttccaatttgttaacattcttgccaacccttgttgttttctggattttttttattttggggttttttattttatttatttattttttttttgaggcagagtctcactctgtcacccaggctgaagtgtagtggcgcaatctcggctcactgcaacctctgccccccgggttcaagcgattctcctgcctcagcctccgagtagctgggactacaggcgcgcgttaccacgcctggctaattttttgtatttttagtagaggtggggtttcactgtgttaatcaggatggtctcgatctccggaccttgtgattcacccgcctcagcctcccgaagtgctgggattacaggcgtgagccactatgcctggccattttttatttttaaacaatagccatcctaatgggtatgaaataggttttttggtgttttgttttttttttttgagacagaatcttgctgtgttgccctggctggagtgtagtgacgtgatctcggctcacctcaacctccgtctcctgggttcaagcacttctcctgcctcagacttccaagtggctgggactacaggcgcccgccaccacacccagctagtttttgtatttttagtagagatggggtttcactgtgttggccaggctggtccacgatccatccaccttggcctcccaaagtgttgggattacaggggtgagccaccatgcacagccagggttttgttttgttttgtttttactatttttttttttttttagagacaagctgtctcccaagctgtagtgcagtggcaccattcgtatctcactgtaacctcaaactcctggacccaagcaatcctcctgcctcagccttccatgtagctacgtctacaggcatgtgccaccatacccggctaactttttttttttttttttttttgagagttttgctcttgttgcccaggctggagtgcaatggcatgatcttggctcactgcaacctcctcttcctgggttcaagtgattttcctgcctcagcctcctgagtagctgggattacaggcgcccgccaccacgcctggctaattttttgtatttttagtagagatggggtttcaccatgttggccaggctgggctcgaactcctgacctcaggtgatccacccaccttgacctcccaaagggctgggattacaggcgtgcgccaccacacctggcccccagctaacttttaaatgtattttgtagagatgaggtctcactgtgttggccaggctggtcttgaacttctgagctcaagtcattctcccacctcggcctcccaaagtgctgggattacaggcatgagccaccacacctggcccctttgcccattttaaaaattaggttgtttttgttgttgttgagttgtaggagctctttgtatattctgcatttcggttccttattggatatgtgattggcatacattttttcccatccatggattgctttttcattctgttatagtatccttgattcacagaagtttttaatattgatgaggtcctgcttagtctgtgttttgttttgttgcttgtgcttttggtgttatatccaagaaatttttgccaaatccaaagtcatgaagctttgccctctgtttccttctgagttttatagttttaggacttaaatttaggttttcgacccatttttagttaatttttgcaagtggtataagggaggggtccagcgttattgtttcacgtgtagatatacagttttctgagtaccatttgatgaaaaggctgtccattgaattgcttttgcaacttttatttgggcatatttatgtgagtctgttactggttctatattttactccattgatctatgtgtctattcctctgctaatactgtcttaaatatggtagctatatagtaagccttaacactgagtagatagatttctcccctttttttgttctttttcaaaattgtcactggtttgtttttattttttactttatgcagataatctgtactatactttggtttcatgtatcaagtagtttgttccaagttgtgctttaagcagaacaaataaattttcatattgttctttgtgttaatctgcaatataaacctataccaaattctattttgtgtatttgtttattgtagtaatctgactgactcttttgcctccagactcatctctttcaaggtccccaactgaatcttgttttaggtggaacttagaagcagtagaagttaagaatctatttcacagccttagtagtctagtttcattctctatataatgttgtctatgcaagtgagctgctctccagtgccttagtttcactaatgttggggaaggtctcttctcttgttttggacttctctatcacattgcctttctcaagagaagacatataatgaaagttgatatctggtgttctaggacttcttcagaagcttgccagtttttcaagctgatttctctcactggcaactcttcagagtgctgttcctactccaccctcccctggtggtatgtatcagttttctactcatcagcacccacctactcctgcctactgtgtttctcagatgtctgctgcctggctagctcattgctgcttttgtcactcatagagctgtcttcttccctttttttggctttctgcctgacttccagggcagctgctctgtcattgcctgtctgccattctgtcttttttccccctaccccccacagatacaacatctactctaataccacacattctccatgttcaaactaacctcatcactttccccaccacattccccaaaactggtcatcctccagcttatagcattgcagttcactgaagttagacatctgggccttgcttacctccaacatctcattagccttcgattctacccctataaatcctcttctcagtctcctttagatattcctgccctgctgtgagatccatctggtttattggctagattacttcagaaagcttcagtcagtgaccctccttacttcaaaccccaccagttgatccttcactctgccatcagtcattgcttctaaaatctaaattgttccatttaaccttgctgtgataaaacctttggtagttcttcagtgtgttcagtggtaagttaaaactttcactgtaatgtacaggccccttcatgatatgatcgctgcctcctcgagcctcattgtgtgcatttccccgccccaccctttcctcacccaccctagtctttcatgtctgccatttttacattcatttagcagatatttattgaagccccctgtgatgtccttacctaggtctttcttgttgccaggaccagacaggctttttcaagcttccaagtcatctcagtttgaaagactatgtctgacccttgtcttggccaattactctttatccttccaagttcaatgattgtcccactgcactccaaccagagtgagagagcaagaccctgtctcagtaaataaaaataaataaataaataaataaataaataaataaatcagccataatttatttaatcatgtctctctcccccattgatagacgttaagggtatttccagtattcttctcttgaaaacaatgctacattgaataaccttgtacatgggtcactttgaaagtatggatatgtatccgtggaataagtttccagaagtggaattgtgtcagaggggttgtgcatttgtaattctgatgaatatttatagattatatgagagtacctgtttactcaaactcttgccaatgcagcattatcaaagttttttatgttcgccagtgtgatagattaaaaaatggtatctcagccaggcgcagtggctcacgcctgtaatcccagcactttgggaggctgaggcgggcagatcacggggtcaggagatcgagaccatcctggccaacacagtgaaaccctgtctctactaaaaatacaaaaaattatccaggcgtggtggcgggcacctgtagtcccagctactcggaaggctgaggcaggagaatggcatgaacctgggaggcggagcttgcactgagccgagatcgcgccacaacattcgagcctgggcgacagagcgagactccgtctcaaataataaaaaaaaaagatggtatctcagcattgatttctttgatcatcagtgaggttgagcatcttttcatagatttaagagaactgtatggttttttgtgagttatgtttcatatcgtttacccattttacttttaggctggaagcagctgttttagtggaatggtggaacaagaagccagattgccatggagagacaactctttctagagatttggctatgaagcagagtagagacaatgatagctgaaggattgatgtagatgcaaagaaatttttcatcttctttgaaaacttaattgtgttaaaaactggtatgaaagggaggggttaaagctagagatggtggtagaaaaaaatgcagggttcctaaaggactgagattcctggatggaatttcagggaaggggaaaatttctggatatagtgactggggagttaagggtgtctagtccaatggcttttattttcttggaagggtaggcaaggccaacagccacatgtgtgggaggagatggttagaggggagaggaggtttgaaggcaccgctatggagaattggagagagctaaggaaagacagaaagactgcagaaagtgcttagggttccactgaagcggaaatagtgatttgtagtgatacaacccttatgagttatttgatttttttttttttttaagcagcatctggcagtccaagtatagggctgacagtttgggatttttctttccatgttggtgtaaaagaagaacagtgtagtgaaggaagttaggacaaaagaatgattgaactgacaccaagttttcttgatttggtagaaaaggaaataaagatagagcagagatattgaaaagaattagagaggggttcaagagactgaaggcctgggtgaggtcagagagcaggtgtggtagacataacagagagaactacaaggatagaaagtgtggttggagagtgggaaggcaagatttattcagtatgggggcttttctgggtgatgacagcatctggagtacagccattgtcgtgagtggcccaagtgtagcagagataaagcgttgttggagtgaaggaagtcaaggaactgagaggctggcctagatggggattttggttgtcatccatgaggatattgaagtcatccaggagaatagcaggcctgggggacaggaaggaaactgagccacttacagtgtcttcagtgataggaaagcacagggcaaaaagctttcaagaacagggactgttaagccgggtacagtggctcacacctataatcctagcattttgggaggccaaggcgggtggatcacttgaggtcaggagttcaagaccagcctggccaacatggtgaaaccccatctctactaaaaaaaaaaaaaaaaaaaaaaaaaaagaaatacaaaaattagccaggcatggtggcacgcgcctgtaatcccagctacttgggaggctgaggcaggagaattgcttgaacctaggaggcggaggtggcagtgagcctagatcacaccactgtactccagcctgggcaacagagcgagactgtatcaaaaaaaaaaaaaaaaaaaaagaacagggactgttagagcaggctccaggagaaatgctttgcatatggcattcttgaggagtgaggaggacctcaaccctacttcctgaaatggagctctgagatgttggagtagaaatttggaaaccagagagagaagtaaggatagtgttgttgcaaatgcattgtatatggggggtcgggaagtcacaggagtttgcctcaaagtctttctcggagacggatgaggttttcactgtgattttcctggtcgtggtctatggatatagtacctgttagtgacatggatcttcttaacttctgatgtgtcttttcctccctagtgtacgcataccaattctctccacagcttccatcaccatgcatttgttcttttcccttgttcttgtattacctttctggaaaggaatttttattgtaggctaattgttactcccaccagtatttaaccactggatatttcatatgattgatctcttctgatttggaaaataaaaatgtaatctcattatattcatttgattagtggggacagtcaacacttctttgtgtattttcttagctgttcgtttttctcgtctgtaaattatctgtttaggtccttcagatttttcaaaattggactgttatgttttcagtattgttatgagttcttgtttcaattatttatgacagttcattttcttttttaaaatagactttttttttcttagagaaataagaaaaaataaaaattaaaatagactttgtgttttagagagtttcaggttcacagcaaaattgatcaaaaagtatggagagttccggccaggcgcggtggctcacacctgtaatcccagcactttggaaggccaaggtgggcagatcacaaggtcaggagtttaagaccagcctggccaatatgatgaaaccccatgtctactaacaatacacaaattagctgggtgtggtggtgcacacctgtaactgtacctactcaggaggctgaggcagaagaatctcttgaacctgggaggtggaggttacagtgagccacagtcatgcccctgcactccagcctgggcaacagagtgagactccgtcctaaaaaaagaaagaaagaaaatatagagcattcctaaataccacctgtccccaacacctgcacagcctcctcattatccacatcctacaccactgtggtacctttgttgcaattgatggaccaacattgactcctcattatcacccaagctttggtgttgtacattctgtagatttggacaaatgtataatgacatgtgtctaccattgtagtatcatacagaagaatttgactgccctgacagtcctctgctccacctgcttactcctctctcccttttcctaactgcacaaccactgattttttttttttttttttgagacggagtctcactctgtcccccaggccggagtgcagtggcgccatcttgggtcactgcaagctccacctcccgggttcatgccattctcctgcctcagcctcccgagtagctgggactacaggtgcccgccaccacatccggctaattttttgtatttgtagtagagacggggtttcaccatgttagccaggatggtctcgatctcctgacctcgtgatccgcccacctcggcctcccaaagctgggattacaggcatgagccaccacgccctaccttttttttaaaaaacaaggtcttgctctgtcacccaggcctgagtgcagtgatgatcactcctcactgaagcgtcgacctcccaggctcaagtgatcctcccacctcagcctcctaaatagctgagactacacacacacaccaccatgcccagctaagttttgtattttttatagaaatgtggtcttgctgtgttgtccaggctggtcttgaactcctgagctcaagcaatttgcctgccttggcctctcaaggtgttgggattacaggcatgagtcaccgcacctggccttttttattttctttttttttttttaaccagtgatcttttactgtctccatggtttttcacattggcttctgtcacttagtaatatatgtttaagtttcttctacgtattttcatgtttttagcttatttctttttagcagtgagtaatatttcattgtctggatgtgccatcacttatttatccattcgcctgctgaaggatatcttgattgctcccagtcgtggcaattataaataaagttgctgtaaacatccatgtgcaggttttttttaagtggcataagttttcatctcatttggttaaataccaaggagcacaattgctggatcatatggtaagagcttatttatttttttgagagactaccaagctgccttccaaagtggatgtaccattttgcattcccaccagcagtgaatgagagttcctgctgctccatattcttacaaacatgtagtattgtcaaatgttttggattttaaaaccaaaatccattttcatagatgtgtagtggtatcccgttttaatttgcaattacctaatgacttgatgttctgtgtcttttcagatgcttatttgccgtactgtttatcttctttggtgaggtgtctcttcaggtcttttgcccatttttaatctggttgttatttttcttgttgagtttaagaattctctgtcctttgtcagatctatcttttgcaaatattttctcctagtctgtggcttatcctctgattctcttggcattgtctttcacagagtagacattttatattttaatgaagtccagactatcaattatgttctcatggatcatgcctttgatgttatatctaaaaagttctcgccatacccaaagtcatctagattttctcctgttatcttcttggcattttatagtcttatgattgatatttaggtctatgattcatttttagttaaatttttgtgaaagataataaggtctgatatggattaatttttctatatgtagctgtccctttccagtatcatttgttgaaaagactatcttgctccattttattgcctttgctcctttgtcagttgactatatttatgtgggtctgtttatgatctctgttccgttccattgatctgtttgccttttcttttgctaataccacagtcttaattaccatagctttaaagtaagtcttgaagtccaatagcattaatctttgactcttctttaatattgagttgccccttcagaatcttaatgtctctccatgtaaactttagaatcagcatttttatattcacaaaataacttgctgagattatgattgagattgcattgaatctataggcttatttgggaataactgacatcttgacaatattgagtcttcctgtccataaacattatttatgatgggcttcttctttatgtttaggagcttttgttttttctgtcagatattccacttctacctttatgatttcttaattgccttttatgcttagaaagtttttcctcatcctgagctcacatattcatttattttcttttaaaatgtgttttcaagcatttaatttttaaacctatgtggaatttattttggtatatggaatgaggtggtggtctaactccctcctctcaaatatgtagttatttttcccaaaaccattttctattaatttatcaagaatagacatgtatacatatacatatataatagtcagccttccacttgttgtttgacccttgtgaaggaaattgtatgagtttccaattttggattaggctcaggtagtaattgagctgggttctgccagagatccatgttaattcactatccaaacagagttataaaatgtaagttttatgaaaatctaacagtatatcactggtttaatgatcacagcctaggaagaatggggaaattgtcaaaatcttctgtggatgcacctgaaggccactgctgaacccatttccctgctaggcacggctgctggtaccaggggcaaactcctggagtatatatgaaccacctacatctccttctcttccccccctacccttgagattttcatgtgtcccttaaggatgtgtgtcctacttcccttggagagtcactaccacattgaacactttagactgtgagtcctgtgaagatggggctcatgagtgtattgctccccagttgtttctctagcactagctcagtatagggcataaaaatctgaatggatgaacaaaccactattactggtggggacatgctactatcttacatggttcgaggtggaataaaggttgagaacagctatataatgtgttccttgaagggcagcagtacatcagtgcaatcagcctaccttctccatacttctcactctgaaaactgtaaagctgcacctagcaatcaacttgggagctttaaaagggactgctccctagctctcacccacaaagctgtagtctagcacaggtgacttttttaaaaaagttttttggtccagatgtgatgactcacgcctgtaatcccagcacttcgggaggctgaggctgggaggtcacctggggtcaggagtttgagaccagcgtgaccaacatggagaaaccccatctctactaaaaatttgccgggcatggtggcacatgcctctaatctcagctactcgggaggctgaggcaggagaattgcttgaacccgggaggcggaggttgccgtgagccaagatcacaccattgcactccagcccgggcgacagtgcaagactccgtctcaaaaaaaaataaaaaaggagtcctattaagacttatttttacaggttggatatctctaatcccaaaatctgaaatgctccaaaatttgaaactttttgagcgcagacatgatgctcaaaaaaatgctcactgggacattttggatttcaaaatttggattagggactaggtgtgggagctcacacctgtaatcatagcactttgggaagttgaagcaagaggatcagttgaacccaagagtttgagagcagcctagacaacatagtgagacgccgtctctacagaaaattttaaaaattagccaggcatcgtagtacatgcctatagtcccagctactcaggaggctgagacagaaggatcacttgagtccaggaggtagaggctgcactgagctatgatcataaccactgtctccatcctgggcaacagagcaagaccctatctcttaaaaaaaatctgaaacactgctagtcctcaagataagggatagtcagtctttataaagactcaattagttattggatatctgaggaagcatgcatatcaggctcccaaaagatcattggtttaggcacacattttaatagcttggaaatccagaatactcttctggtgaccagctcagacatagtcctgataatataggacctcatctaacatgactccctattttccagataagcatggattcctggttcattcttgttctgctcggcagtggtctgatatgtgtcagtgccaacaatgctaccacaggtaaattgtcatttgataaggctgctatttgaaatgaaattttgctttcacatttaatgagccacatttgaaaaccgagatggtatttgaagaaaggaatataaaaattttattcaaagtgatggtaaaataggtgtcttcagaaatcttggaattgaatgctcagcattgtttttcatacatacataactgctttaaataaatcaaagagattatgtgttctttcctgaaaagtaaaataaattgttgacatttacaactctatatatggtttctgaggaactaagtgaagaatcttgtgtctttctcccttaaaccgtagtcctttggaggaggtaggaaaggtccagcatgagataaaaacgtagggggtgggtggtgttgagggggattggtctttgcttggtctccatatgtttgagagtttattaaggcttgctgctttgtgtctcacagctttttagcctcacattcttcatgtgctatttccttgttttttggtgtttgtagttgcaccttctgtaggaattacaagattaattaactcatcaacggcagaaccagttaaagaagaggccaaaacttcaaatccaacttcttcactaacttctctttctgtggcaccaacattcagcccaaatataactctgggacccacctatttaaccactgtcaattcttcagactctgacaatgggaccacaagaacagcaagcaccaattctataggcattacaatttcaccaaatggaacgtggcttccagataaccagttcacggatgccagaacagaaccctgggaggggaattccagcaccgcagcaaccactccagaaactttccctccttcaggtactagagatgattctgtttgttcttttgctctttgagtttagtcttccttttattatcttgtttgtgttttctagccttaaaatttcttcaaataagtaaaattgctcaagtgaagtaatgaaacctgtatgtggaatttttgggttagcatgagtgaagaggaaagaagaaagattctggagaatatctttctgctaggtgggatcctggttagattgagaggacttaaatgtgtttaaaggtagagaagaaggcttaaaaagacaagagaaatagaggagctcattgacgatgcaagagactgaagatgaaaagatacagagaatgagtaataagattaggtttggaaagggagggatccgtggagaccatggaaaggagaatgggtattgatgtccatgacagttagatgtgagatacagagaatgagtaataagattaggtttggaaagggagggatccatggagaccatggaaaggagaatggacattgatgtccatgacagttagatatggagtggcaggccagtggccaggggtggcatcaggctctgggaaatggttacattgcagtgccagttgttcagggcctcaggttgaagcagtagtcccaaggagaaaatcagagacgtggatctgagaccagggcaggtaagacaagtttctgacctctttgaaccttaggtaccttgtctgtaaaagaggattagagataccctcaaagggcttctatgaggagtaaaggaaataatcattacctgattgctatgtaactgtcatcccttttctagcaaaaatcactctttcctcttctgtgttcccagttagatggtgagtgcccctaagcagaatcacatctcgctcatgtggaacattcaggaactgtttgctcagttgattctcatttgttactacagatgatatcttttactgcgccttataactcagacccttcacctgccagcttttccccatattttctaccgtaaagacaagacagcatttgcagttaagagcacagtcttcagtgccacactgagtttgaatcccagctcttccataaaccagccatgtttatggcatagctggcttactttatctctctacctcggtttgttcatctgtgaaacaagaatgagtgatagtaatagttcttacctcatagaggagatattaggattaaacaagttaatatgggtaaagcacttataaaggtgcctacacatggtaagcactatttttaagtgtgagctgttagtattgttgtggttattgctctgatagttaccagtaaaatatatgaaggtacctttaatgcagatggcatcccactattcttgatgagataggggactgcagacaaataatgtctgatacttgctttgtgctttagagttaatgtagttttgtcatagttattactgtgtgctaggcatcgtactaagagttttctagaataatcctatgaattaagttctattttatgttttataggtgaaagtattttacaatgatgaaaccataatttgtggaatgtttttcagtgtacaggtcatgacacaattcatgaaatcactttagcaggccaccactagttgtttgttttgttttattttaatggatgatccagttccatgtttattcttttaatgttacatacaattttttgaaattttagtaacaacataaaatgttgggttgtggccattgcttagggagaaaggcaggataacttgtacaaactgtatgagtgaatggaaaaggtggagactgtaacacaggcctgactgactgaacagcccatgttctattgtgtactgtctttcatttaacagttctgtgacatgaccatggataatcatctccttttaacagatgcttgatttcagactgtatatagaggttaaatgatttgttttagatctcaaggctgacaaattaggcctatttctcacttttgcggtctttccactctgcttgtagggaacttagttttccataaactgacttaggtccaaattgtgccacagctaagaatctagttattgtacatttaacacagttcacgtcataggaggctgagactatgtttctctagtggcgtttattcaagatgagtaaaacacaagaaaccattatcgcacatgggaatttcatagtcttaaaccccacatcccacttatcaccaccatttaccagtcctcctgtaacagttacaattttttattaaatcagtatttgatgtatattattgtaattatgaaatattcattgctgagctataagtataaatggattgtttttcttgtacagttttttttctggatttaatacttaccttattttttgtttatttagttttctatttagtcaggccaggcacactggctaacacctgtaatcccagcactttgggaggccaaggtggacagatcacttgagctcaagagtttgagaccagcctggggaacatggtgaaaccccatctctacaaaaaatacaaaaattagctgggcatgggtgcatgtgcttgtagtcccagctactcaggagcctgaggtgggaggattgcttaagcccaggaggttgaggctgcagtgagctgtgttcataccactgcactccagcctgggtgacaaagcgagaccatgtctcaaaaaagttattgctactcaattcttaccatgctctccagagcctctcaaaacagctttctacaaagtgagatctgttagataatctatttcttttttacctctagaaattcctcctgagccctccattgtcttattccagtctaggcttgtcgatctctagggctactacacagatacatcagcctgagatttcccttctctgtcattctgggaattccccttgctgctgcttcctgacttccatattgtcttcctttttgtcttctcatcattcggtagattcctgagaaaaggggtccatgggaggcaaattgcatccttacatatctaaaaatatctttagggctgtgcatagaatttgaggaatatttttcccccagaatttttaaagtaatgccctaactgacacctgtttaccaggtttggaggattttactgctatcttaatccctaattgtttgtatgctttctaggatcttctctttatcatcagtatcctgaaatttcacagagatgtatcttgatgtgggtctttttcgttcattattatggatacttaataggccctttagagccttgatcttgcatttctgaaaattttctcccatttctttgaaaccttctccccctcttccttttttttttttctcaaattcttaatatttggatattggatgtatcctgaattaattctttaatctttaaaatttttcctttctgttgatctttgctttgagtctttttctccttttaaaaataaacaaaggccagctaggcacagtggcttatatctgtaattccagcactttgggaggctgaagcaggaggatcgcttaagcccgggagtttgagaccagcctaagcatcgcagcaaaacctcatctctacaaatgatttagaaattagcagggcctaatggctcatgcctgtggtcccagctactcagggctgaggcaggaggattacttgaggcctggcagttgaggctgctgcagtgagctgtgatcgcaccaccgtactccagtctgggcaacagagggagacctcatctcaaaaataaataggcctggtgtggtggctcactcctgtaatcccagcactttgggaggccaaggcaggtggatcacttgaagccaggagctcaagaccagcctagccgacatggcaaaaccctctgtctacctactaaaaataaaaaaattagtcaaacgtgttggcatatacttgtaatcccagctacttgggaggctgagacatgagaattgcttgaacctgggaggtggaggttgcagtgagtcaagtccctgcactatagcctggggaacagagtgagacccgagactctatctcaaaaaaaaaaaatcagtgacaagtaaaaaggtagaatacctttttttttttctttgagacagtctcaccctgtcgcccagtctggagtgcaatggcgcagtctcggcatactgcaaactctgccttcagggttcaaacaattctcctgcctcagcctcctgagtagctgggattacacatgcccaccaccacacccagctgttttttgtatttttagtagagacaggtttcaccatgttggccatgctggtctcgaactcctgacctcatgatccacctgccccggcctcccaaagtgctggtattacaggcgtgagccactgcgcccagcctagaataccttttaaaaataaataaataggccgggcgcggcggctcatgcctgtaatcccagcactttgggaggctgaggcgggcagatcacgaggtcaggagatcaagaccctcctggctaacatggtgtaaataaataggccgggcgcggcggctcatgcctgtaatcccagcactttgggaggctgaggcgggcagatcacgaggtcaggagatcaagaccctcctggctaacatggtgaaaccccatctctactaaaaaatacaaaaaaaaattagctgggcgtggtggcaggtgcctgtagtcccagctactctggaggctgaggcaggagaatggcgtgaacccaggaggtggagcttgcagtgagccgagattgcgccactacactccagcctgggcaacagagcaagactctctctctaaataaataataaataaataaataactccttttacaaaagcatatatattcattttttccatttataatataaataatagatatgctgagttgatttctgcatattgctttttcagttaccctatcatacttgctctttgttttagtaaagagctgctgtattgaaggatataccttaatctctttatccagtttccccatcagtggacactaagattgttttcagagtactcttataaacaatacagtttgtcatttcagacacatatgagaatattagcaggatgaattattttaagtctgcatttataaatttatggatattgccacatttacctctgctaggaagtctattcctattaacaatatgtcaaagtgcctatttttctaaactctcttcagtgtggtgaattgttaaacttggggatctctgccaatctgacaggtgaaaaataacatctcagtgtaagtttaatttgcattttgctgagattgagcaattttgtgtaatttaaaagatcatttatttttctgagcattctctgttgatattctttacccatttttattagagtgtcaaggttttcctgactcgtttgtagatgttctttgtacgtttgggaaatgagtcctttgcctatggtaaaactgcaaatgttgttccctaggtggtcatctagattttctgcattgcagaagatatcattagctatttttaatttttttaatttaaatatttctcagtttaggttttctaggaattgggtcatatctaggaaggctttccttactccaagattataaaaataattttcttctggacttctatggtttcgtgtgtgtgtgtgtgtgtgtacacgcacttaagtctgtctcgaatttattctgatgcagagtgagctatggatctgtttttccccaaatatctaacttgtcccaataccccttaataatttatttttcctcattgatttgaaatgccacctatcttatatattgaattcagatatttatttacctcttcatatgtatttgagtatttgggaacattcattttattttctattaatctttttctctgtccatgtgcaaagcctcactgtctcaataattgtaactttgtaaagtatttaatatccagtaaaatgagtcattccttgttaattttatttttcagaattttgttagcaattcttattataaacattagaattaacttgtctagcaggaaaaaaagtttgtattgatcatgttaaatacgtagattaacagagaaaatggcatcttacagatgttgagtctaactatccaagaatgcaatatattccattttctgaagtcttttttttttaaatcttctgtttttgtaattataaatggagcattttcttccatcagatcttctaactggctgctgttggggatatgaaggctactgatttttgtagagacattttgtactggccaccttaaactctcttagtattggaagtaattttcttcattaatttttatggcttcaagtcatctcatctgcatatatcttccaaatttttagaactttctttttcttctgtttaatcgcattgatgaatacctccagaacaaagttaagcagctggtaaatgcagacagcattctcttgtatctgacactaaggaggacactttcagtggtttttcattatacgtggtactgactcttgagttgagataaacatattttattgtgttcaggatttaatgagcgtttatgttaggaatgggtgttaaattttgccagttgcctgttcaggatcaatgagaaagatctgaatgattttttttctcttttggtctgtttctatggtggattctattcctaggtttgtttgtttgtttgtttattttgagatggagtctgttaccaggctggagtgcagtggcgccatctcagctcactgcaacctccacctcgcgggttcaagtgattcccctgcctcagcctccgagtagctgggactacaggcacgcaccaccatgcccggctaattttttgtattttagtagagacgtggtttcaccatgttggccaacctggtctcgaactcctgaccccatgatcctgcctcagcctcccaaagtgctgggattataggtgtgagccactgcgccctgccagtttttatttattcattttttagagacagggtcttgctctgaattaattctttaatcttcttaatttttcttttctgttgacctttgctttgctttaagtcttttcctttgagtcatccaggctgaagtacagtggcacgatcatggctcactgtaaccttgaactcccagacttaagcaaaccccacctcagacttctgagtagctaaggactataggcgcatgtcaccacgcccagctaatttttaaattttctcagaaacagggactcactgtgttgcccagactggtcatgaactcctggcctcaagcagtcctcagccttagccttccaaagcactgggattataggcatgagccaaggccgcccaaacatattgtatcgttcctgtaacaagctgttgcagtctatttgatattatttcttatttttttcatttagaattttctctgtctagatattctcaaattatctctaaatgagattgatctatgtttttcctttgtgtgtgtattctttttgataagttttagtttttagtgttttgttttgctacatggaaaggatttgaaagtttacactaaaaaatatgctttttttttttaagacaggctttttcactgttgcctagtgctggagtgcagtggcatgatctcggctcattgcggcctgcacctcctgggctcaggtgatcctctcacctcagcctcccaagtagctgggattacaggtgtgttccaccatgcccagctaattttttgtatttttttgtagagatggggtttcgccatgttgcccaggctggtcttgaactcctgggctcacatgattctcctgtcttagcctcccaaagtgctaggattacaggtgtgagccaccacatctggccatttcattcatgttttcaaatgtatttgaatgaggaaaagttctcccttgtgattatttattataatagcctacagagctattaatttttaaattttgtttactttatgtctcctttttttttttgtttaggctgaataaccatttatttcataggtttattgccttttttcttccaaagaacttgctattgtgcatttatagtccttttatgtttacgttttctatttcattgatttttactttctaccttctttagatttattttgttctttttctatcttcttgaattgagtgtgctttaattgcattctttccagttaattaacatatttagtgctgtgaattttgaacaagcacagctttagccacatcccataggtgtttctataggcagttgtattaggatgcgctataagctgctctgacaaagataccaaaattcagtgacttaaataagaccaaagtgtctttctctccccagttacattccagaggtagacagggccttcgtctcagtagggaccaaattcctttcctcttgtggccctgccatcctaacaatattgcccttatctgtttggttagagatagttctcaccattgggttctagttccaaccactgcgaaggacaaacaaagggaataggggccatttctcttccaaaagatgtgacctggaagttactcacattgctttagctcacatcccgttggctagaattcatcacatgaccacacctagcacaaaggagtctcaaatatagtctgccaggagagcttggtgctcagctaaaaaacaaaggttctgtatcaaggcaagaagagaaagagactgatctgaggggaggagagttggcaggttctgtcacaaaacttctcgtcattgttatttttaaggtatttttccattttgggttttttgtttgtctgatttttttttttttttttgagatggagtctcgctctgttgcccaggctggagtgcagtggcgtgatctctgctcaccgcaagctctgcctcctggttcacgccattctcctgcctcagcctcccaagtagctgggactacaggcgtacaccaccacgcctggctaattttttttttgtatttttattagagacagggtttcactgtgttacccaggatggtctcattctcctgactttgtgatctgcccacttcggcctcccaaagtgttaggattacaggcgtgagccaccgcgcccggccgtctgtttgatttttgagatggaatctcactctgccccccttctggagtacagtggtgtgatcttgggtcactgcaacctctaccctcccaggtttaagcaattcttgtgcctcagcctcccaaagtgctgggattaaagacgtgagccactgtgcccagcccattttggttttgatttttttttttctttgaaatagagtctcgctctgttacctaggctggagtacagtggcatgatctcggctcactgcaacctccccctcctgggttcaagtgattctcgtgcctcagcctcccaagtagctgggattataggcacccaccaccacgcccagctaatttgttttgtatttttagtagagacggggttttaccatgttggccaggctggtctcgaactcctgacctcaggtgatccactgcacccggcctcattttggttttgatttttattttcaaatgttttcttactttgtcaatttctaattttattgcattgggacaaaagaatattgtactctttctactgttggggtttataagggctgtggatatttcactcgcctttgaaaagaaggttttctctgttagtctgtagagtttggtatgtaccaattagattttattacttatcattttggtcttttgtatccttacttaattttgtcctcttgaattttaatggagcaaaagacataaagtcctctaataacatgcgttctgtttgcattctcatactttttatgaatattgatgctgcactatttgtgtacccagggagaaggccagaccactgtccaaagtttagtgaatctgggcagccttgtttcccagttgttggaggatgcctcatggaggaaagcattcctaatcctggagcttgttttgttgtactctaattgaattgtaatgtgtttctttaacctgaatgaatgtttctattttttacttattacacaggtaattctgactcgaaggacagaagaggtgagctgctcaccttatatctgttgttccttttacacagtgtacagtattcatttatttcctctgctcacagtctgtggtaaccgtgtgcatctgtggctgtgttgtttgtttactttcccttaagttatttccatgttaatctcatggagaagagcaatagaaacaagtactgtattcagtatgttttttaatatagactatggattctaacagctatgatgtattttaacaagtaacaaaatatatcttactttgacatgtcactttgttaacattactttttggtgatattaggtcataatttctataccattagttacttctgatttctaggccacagttccctttaaatattctttgtgttgtttttcccctagtgtataaaatgtcaaccctttgtggctttatatggattttatggattttcagcccttaaatgtaaagtctctatggcctgagatgttgtgtctgtggtttaagctggactgctgagtccctggtcactagagagtagggggacatgggtacttgtctgcagaagtgtggcacattttgcctagaatgacagtaaggctgctatcaaagagcatgagagaaagagaaagagatcatctaacattctaagaagtgattattacatttgagttttaaaaatgttactattcgaagcagtgtttttatcataattttctattttatcaaatcagacttgagttttttttctgattctgttatttaaccatacacaattttccctgtgtaattaagtaatggaacacttggaggcatatgaagtcccactaagtagggagcatttgagtcagaaaagtgggtactctcttcctttatgtgatgtccatctgccattgtatttggtaaggaatagtgaggtgttaccatactgtgtacagatttccctcacttttccacctctcactttcctaaacttgggaactaaacattggattaatacagtgtctttgctgttcagattcacttgccagattttatcaaatgtagacttaaataggttttattgtgatagatatttacttgctccctaaaactgctctcttaaccagccttacaataaagtcaaaagtcaaagtggtaggcttcaagatgaaacataagatctgttgactccttcctctatttagtatatattttcataatattcagccttttcttgccccagatatcatatctattttacctacccaatatttaagtagtttccatgttgtgattaagaaaacaaaattaccataattacctagattattgctaattgtgacatatgtaaagtctattaatgtaataaatctcctttcttaagtcaaaaaataattttgtgtaattccaaacaggaaactgaaaaggcataggtattctcagcagtctctaaagtcccaaaatctaatggcaattttaccagagcagatctttagaagtattgctataaatttggatatcccattctaattttaagccaaatgctttttgagaaataagccagctgtttggaaatgcttgtattataatcggtttgataagcagttatgtcttatgcagatgaattaggggctacctgtttttatgcactggtctttggggtgcttttgaacagtagtgtctgatgttttaattgtcaaagcaaaaagaaatgagagggagggcaacttttcttcctcttctgaagtccaggaaactggttattttctcatgcatattattttaaaatatattccagccaggtgcagtggctcacgcctgtaatcccagcactttgggaggccaaggcgggtggatcacaaggtcaggagttcaagaccagcctgaccaatatgataaaaccccatctctactaaaaatacaaaaattagccgggcgtggtggtgtgcgcctgtaatcccagctactcgggaggctgagtcaggagaattgcttgaacctgggaggcagaggttgcagtgagccaagatcgcgctcttggctgcgatccagactgcactccagcctgggtgacagagcaagactctgtctcaaaaaaaaaaaaaaaaatcagactcttaatatttgtaaagaagtagtccttgagctactacttaagtctagaaagagttgatattcttgttttaagagtgttagggcactttgggaggctgaggcaggtggatcacttgagcccaggagttccagaccagcctgagcaatatggggaaaccttgtctctactaaaaatacaaaaattaaccaggcatgtggtacgtacctgtagtcccagccacttgggacgctgaggtgggaggatcacctgagcccaggaaatggaggttgcagtgagccaagattgcgtgactgtactctagcctgggcaacagagcaagactctgtctcaaaaaaaaaaagggcggggattatcatagtgccattattattatgagtttatgatggctttctctaagcaccttttacattcggcatttattcagtacctattaagcatcaaggagtccagaaaaaattttatatataaatatatataaaatatgtaaatatatatatgcatatgcttccctatctcaggaaggaaatatgtgaacatcaggaaccgaagtctactcagttacatgccattggatatatcacacaaagtgctgagggaactcagaaggctcattatatctggggagtgggaaggaggcacagagatgtgctttgggaagtttaaattaaaatagcaaatggggaaaatgaagacacaccagacagggcacaagcaaagagacatgaaagagtaagtcatgtgtttgaggatctgtgcgcagttgacatgtgtgaggtgtggggagtgatcagaggtggcctcaacagaatgggtgtggtggtccactgagttcaggagttggagcatctcctgaagatgatggtgagtaaggaagtaacatagtcagattttggttttagaaagatattccagaggacttaggggagatagatggacaatagaaatttaggtttctgaataatttggctcaaaacaacggtgattgggctcaacccagtggttagattctagaggcaatccaatgaatattgctgtttttagagccaataggaaacatttaaaacaacattacaaccttgcctttgagagctgataaatacttgtaccaaaaagtgtggcaataggtaaatgggccataggaactggggctataggactatggctattcctttactgactagtttgtagttgaccagtgtgtgtctgaagtccttaagtcactcacctgtttagaggtgagcccttcaattaatatggccctttgttttcaaggaaagaagttatagcaagtaggtatctgttgtcccgggacaccattttagtggttttcattttcatgcttgctccctggcctgaatctagaaagtaaaactttgctggaatgaagttggggttgaaacagtttcggtttgtaaccatactgtctctgtctcatctactcagctctgcctttgtaatgtaaaagcagccatagatggtatgtaaatgaatgaacatggccatgttctgatagcattttatttacaaaaacaggcagtgggctaaatttgggctatagtttgccgacccctcttctaggcaaagaactgcctgagcgtaggaagctggactgaggttctctgctagtgtgtgaacttgtggatgccaaagccaatctcttcccttcatgtcagacactttgcaaatgttacctcttttagatctcccattaactctaaaaggtggagggtgctattatgcttccatttcatacattgttctaagagattatcacactactagtaagttaggatagtaggaatttgaacttcaggtctgtcagaccctaaaaccccatgccctggaaatggttttctaaggctggcctgtggttcgttggttgatttcaattagaatttaagaattttttcagaatacatctaggtgtaaagatttttttgtcaatattactccacaaactagattatttcttttggcctgataactcaggaactttcttgtattacttctctcccttcttactggtttcttctttggactctcctgttgcacaggtattggatctcctggacctatccagttcctttcttttctatgctgtcatatttttcatctcttattgctctgtgttctgggagcttccaggacagttgctctttcacacaactaatttggttttcagttatatcagttctcctatttagcctttctttttttggaggcagggctggggcagactcatgctctgtcgcccaggctggagtgcagtggcctgatcacagctcactgcagccttgacctctgggactcaagcgatcctccagcctcagcctcccgggtagctgggactataggcatatgccaccatgcccagctaatcaggtgtttgtttgtttgtttggtagagacagactaccagagtctcgctaagttgcccaggctggtctcaaactcctggcctcaagcagtcctcccaccctggcctcccaaagtgttgggcttacaggcatgagccaccgtgcccggccctgttaagcctttctatctagattttttccctcctaatcatgttggtgtttttttgtttgttttcatttttgttttgttttgttttgagacggagttttgctcttgttgcccaagctggtgtgcaatggcacgatctcggttcaccgcaacctctgccttccaggttcaaacgattctcctgcctcagcccccagagtagctgggattacaggcatgtgccaccacacctggctaattttgtatttttagtagagatggggtttctctatgttggtcaggctgctcttaaactaccaacctcaggtgatctgcctgcctcggcctcccaaagtgttgggattacaggcgtgagccaccatgcccggccagtttttaaagaactccttcttactactcagattactcctttttaaatagtggcttttaaaaaatatcaatgtaggctgggcacagtggctcacacctataatcccagcactttgggaggctgaggcaggctgatcacctgaggtcaggagttcaagaccaggctggccaacatagtgaaaccctgtctctactaaaaatacaaaacttagccaggcctgcagttccagctactagggaggctaaggtgtgaggatcgctcgaaccaggaggccgttgcagtgaaccaagatcacgccagtgcacttcagcctgggtgacggagtgagactccgtctcgagaaaagaaaaaaaaacgcaatgcagcagtggctcacgcacataatcatagcattttgggaggccaaggcaagaagatcacttgagaccaagagttcaagaccagcctgggcaacaacaagaccccctccccccatctctacaaaaaatttaagaaaaaaaatttttttaaatcaatatggcatcctgttgcacaaattgcagtatattttgaaagatttattctgtttcttttgtcacctccatttcccagggctactgttgctctgtttgagctatgccctggaccattgagtggcttagactgtgctcacaataggtgtcccttcatcccttcagaagacaaacatggacatacgtcctaaaccaggaaggggttcagtgatggctcaggaaaatcggggcagggtgcagttatcctctaggcgagctgccgttttctttttcctttcctctcttgtggttgcctagaattagcttgggcactactatggtttttttctgtctgcaggccccaggagaccttctgtggacccaatatacttaacaatcatatgcagtgtagacctgctctggtgtcaattctaaccaaaacaaaaaaaaagcatttatgagacactcagggaaattcaagcagtaactgaataatattagatgatactaaggaattagtgttactttttaaattggataatagtattatgtttatgttaagaatcttgatctcttggtgatacatacctaagtaattgcatttgaaatgctaggtctcggatttgccttaaaagaattcagttagaatggcgtgagtatagaccagtggttccttactgggggctatttcccccacaaaggcatttagcaatgcttggagatacttttggtcatcaaaattgggaatttgctacagacatctaataattagaggctagggatattgttaaatgtcctacagtgcacatgacagacccacataacagagaattgtatagcccaaaatgtcattagtgtgacgttgagaaaatatatatgcagcatatgttttgtaaaaaagaagcccttaccagtctctgtgacaaactctctactctgtgtagagcactgtttttccagctgagtctagatgggaagccccgcttgtcatttgggctgtgggtgtactggtgctgggttggcaggcctttgcttaagtaccatcctggtacctcaaggtccactttcaaccccagtcccaattccctctgagcttgaggtgtttccaggcccaaactggtagaactagtacttagttttcagctggaggctctttggctctgtttgatctcttggacatcgagtctggtctgttttgtcttccagaaatctctcaaagattctgatctacatatgccaccgtttgctgcctttcagatatgctgttgattcattagtatttttatatttcttctaccatgtcagtgtgctttgggggaagatgaagtaaattcatggatttagcccagtgtcttaagccaaaggtgcctaattactttcttcttcttctttttttttttttttttgaggcagagtctcgctccgtcacccaggctggagtgcagtggcacgatcttggctcactgaaacctccgcctcctgggtacaagcgattctcctgcctcagcctcctgagtagctgggaccagaggggtgtgccaccacacccgctaattttgtatttttagcagagacggggtttcaccatattggccaggctggtcttgaactcctgaccttgtgatccacccgcctcggcctcccaaagtgctgggatgtgcctaattactttcttataatacctgatatactgccccctgttgttggaatttaacaaagacatttagtgataaattactatttttttttgttctttggctcaacgtaatccattgtttgttttgtgcctgttatgtgtgagaccctgtgctaggttttaggtgtacagtgagaatgaagcagacatgtaatccttgctcttgtggaatttatgctataaaggagggatattcattaatcaacaaagtcaaatatgtaattataaagtgtgagaggtattatcaaggaaaataataaggtccttgccttacaaaaatagtataggaaataacagcaattttttttttttttttgagacagagtctcgctctattgcccaggctgaagtgcagtggcgcaatctcggctcactacaacctctgccccccaggttcaagcgattctcctgcctcagcctcctaagtagctgagattacaggcatgtgccaccacacctggctaattttttttgtatttttagtagagatggggtttcaccatgttggccaagctggtctcgaattcttgacctcatgatctgcccacctcggcttcccaaagtgctgggattgcaggcgtgagccactgtgcctggccgtaacagctaaaatgaagtacacactgtgtgctagttactgtgccaacaactttacatgaaagatctcatttaatacgcagaataacttatttcagaaatgaggaaactgagacttatgatcctaatttagtattaggaagtcagagaagacctgtgtgggaaaagtgacacacagagaaccagacaagtaggagataaccaggcaaagaacagagagaggctgtgtaaagcagaaggaataacatgctcaaaggcctgaggatgaatgaatgaaagcatggaaggacaccagtggctgaaattgagtgagcaaggaaagagtgcaagagatagggcaggtaggggctaaatcgagggggttgttagagtccaggataaggagattagatttcattctgaggcatgagaaactgttggagggttttacctaagagtgggacacaacctgagttgctttcctagagatcactctgctttgtggagaatggattggcaggggcagaggcttactgtgatccaggtgagagaggatggaggttgggactacactggtggcaataaaaaaaatgcaaaaaaaaaaaaaaaaaaaggcagacagatttgaagttttagatatatctccaaaatatattatttgcagctgtgctagatatagaagataagtgtgaggaagaaatcaagggggtttccacatttcttacttgagcaacagggtgggttggagtactagctactgaatggtgagggaaaggttttaaacacagaaagcttgtgttgcctatgaaatttaaagtggaggtggcaaataggcagttgagaatctggaactcagaaaagaggtctgatcaagcaaagcaactgtgggaattgctagcatggcatttatatttacagtcatctctctgatcagattaactagatatagagaagagtgccaaggacagagccctgaggaattcccacatttagagatctggtgttggaagaggaacagatagtgagggaaactgagatgggcagacgagatagaaggaaaatcagaggagtgtttcgttgtggaaagctaagagaggaaagtgcttcagagaggaaggagtgatcagccagtctgaacactcattttaaggtgagagccacataccacagtatgtttgaaacttaccattaacaaagaagcgtcatgtaatgtcttccatctctaaaaacaaaaccaaaaaaaacccatctgtccacctcactcacatctccctccatctgtcattcctttcctctgcatcccttaatgttaaaagtccccacgaaaggacccagtgtctcactgtcctttttctatctttatttcactccatttaggctttctcacccatattcaactgaaaatactcttggaaaggtcaccagtagccaccgtcttgtcaaatctggtttcacttctctgtctcatccttcttaagtctgtaggcagtatttgattgaattgattgctccctccttgaaaaactctgctcttggcttctatgacactacattcttagattaacctctcacctcatggctactgcttatgggtcagtttagcttttaacagaatgtaaatccagttatatatctcctctgttcaaagcccttcgatgacatagtgtttctcatcacactcagaattaaatccacaatcattacaatggactcccaagtcctaagtctgctggcttttgcccacctctctggcatcttatattgaactggcctttgtgctgtttcttgaacctgccaagctcctgagagctaccatgcttgctgttcccagtgtctagaaagctcttcacccagatctttgcgtggttcacttcacgttatttagagctctgcttgtatattacttcctcagagagaccttcccagaccactgtatcactgctccccaacctgtcactttctctctccccaccctgctttttattcctcatagcacttgtccctgtctaaaattaagtattgacttgtttataaacagtgtcttccttcctccccacagaatggaagctttctatcacttgtctccttgaacacttctctgttcctagtgtctcaaacaatggcatgcaattgctggcccacagatatttgaatgaatgctgctaaaaggttgaatcagatgaggatgggaatgttcctgttggatttggcaatatgccatttgttggtgttctggctgagcagtttaaacagagcactgagggtgggagtcagggcaaatagattaaggagaacctgaaggtaaggaattagacaagacgaattagacaactgtgtttcggaaagtcagctgagaagagagacgcgaggctggtggtagctgggggagggtaaatgaggtcaagaagacaagtctttgagttgacagcagtggatgtaatccagagcacacatgacaggatggaagagacttgtcttcccttttagcaggtaggaaaatggtgaagatagttaccaagccactctgatggtgtagttcatggagtcgggtggagggtgagagtggaggcggatgagtcagtgcctggccagctgcatgagaaaacaaggctaggtattgggtgaaagggagccaggccctgtggaatgaggtgggattgccatgtcttcaaaccagatgttgccatggttggggtcctggcaaaaggtgactaagggagcagggtgtggaaagaggaaaaaagaagcaaccagcagttttgttacatggtggctgaggatctaataatgtctccttgttttattttatttttatttagctggtctcaaattcctggcctcaagcaatccttctacctcagcctcccaaagtgctgggataggcatgagccgccacacccagctgtctccttgtttgtttgtttgtttgtttgtttgtttgtttgtttgttttgagacagggtcttgctctgttgcccagggtggagtgtagtgtacaggcccggctcactgtaatctccatctcctaagctccagtgatcctcctacctcagcctcctgagtagctgggactataggcgcacatcaccacaccggctatttttttaatttttagtagagatggagttttaccctgttgccaggctggtctcgaataccttggctcaagcaatccacccgctttgtcctcctaaaatgctaggattacaggcatgagccattgtgccctacttgtctccttgttttaattaggaacagtattctctgtgcccggaaaccatttgggtttatgataggaaaactgtctttttcccttcctctcccatcttcctctagatggaacccattgaggctgagagagtgtacagtgttggccctgcatacctaacttgccatcagaattgaatgtgttcatgcctccagatattccagtgctttttatgtgctaagtactgttttaggctcaaaggatatagcagtgagtaaaacaaagtgtctgcctttaaacagcttttattctaatgcagggagacagagtaaataaatgtatgatagtcagagatggggtgagcatgtcatcctgggccccatgctctctccccacctcacctcaatagccctggcatggcagtgggaggtgcacactcatactttcttctctgtttccatttcctggcatctgcagaaggactgaatgagctcttcctcttcagggtgttgccctgaatggctgacttaagccctccattgcacaacacagtaatgacttgttctgttgtcttgatttcagatgagacaccaattattgcggtgatggtggccctgtcctctctgctagtgatcgtgtttattatcatagttttgtacatgttaaggtgagcctactaacacttcacattctcttagattctgtttcaatatcccagtgtcccaatgaacccacacagtccagtagacagtaggatatacacaatgaataggatagagggggaatgacccatgatagtgctaaaattgaagttctacttagaaattatttaaaagctctacatagtcttccttaagtcctaagccctccctctttcttccatctgtccaagcccagtctcccaactccagtgcaagctaaagcccagaatggtagtttggaggttgaggtaagaaaccgcagtttgttattagtgacaggtgttacaggatctctaggtctagccctgctgaagcaacccctaaaagggccccagtaagattacatgctcaacaaaagcctactgtatttctggctggggctttgtccccagacccttctgggacccctggccctggcatgttgagttgagccatgtgagttgtgagttacaggatccctctttctaaccttctttcagggtcctctagacgttaccactcaagcagaagcaaggaaggggaacccaagggagagaagagggtggtgcatttattctcttcctgctaaagctactgccctgactaattggatttagccctgccttatctttggcctaaccaaagatgttctgtgctccctctgttcttctgcagggataaagagagaggaatcatgtgccccctataatttgtcatgtgtctctatcattctgcaggagacttgtggccaggactgtgtccacccaatccaaagctctgggcttctccctgggtctcccaggctacactgaggaaataccaagatttttgtttgatatatattgtctgtctcccccagctgtattccacccactcaccctctctctacctggtgtggctgtgctctgcagtgagccacatgagcctgaatatactgttggggttccctggttggattccagtgtgccaagggtaaacaggagtatcccgaggtactcggtcaccccagcatgctgctgcctcagggtgtgcatgacctgtctctaaaaaagcccgattatttttaaaggcgatttagaaaggctgaattgatgagcaggaatacagaggtgtgatttgcctctcccacctctgtgctccattcttcactgtgatcattttctcattaggtttaagaaatacaagcaagctgggagccattccaattctttccgcttatccaacggccgcactgaggatgtgggtaaggcattccttaatgtcatggggaaccttcacaaggaaggaaatcaagaaattaggagtttctccatccttttaaaagaataagacaataaaaagaggaaaaaagatttttgaagaaaacagtcctagttcttacaggcttggtccatgaggtagaaccccgtttagcctccagaagaggggctaggttctcagggtacctgactgaccttctcccttgtgtactgcagagccccagagtgtgccacttctggccagatccccaagcaccaacaggaaatacccacccctgcccgtggacaagctggaagaggaaattaaccggagaatggcagacgacaataagctcttcagggaggaattcaacgtgagtactttgttgaggctggtgtatcagcagggaagaaggcagacctaaagtcagacctttcagatctttggagtcatgaagtaaaaaatgggcttttaatgtttaagaggtgagaaatgttttaccaagtttatctgactccctgtatgatcatggataggaaatgaagtgagatttgcctcacctccctaatctacccatccattcagtcatcatcacatctcttacttcttttgtttaataaatacttagcaagcatctaatatttgtcaggtaatattctagttgccagtgatatgatgaggagcagaaacagatccaatccctattctcaaggaactcactgtccaggagggaaacctcacaaacaagaacaaatataactgtgtaagttcaaacagcagtacagcacatgaaggactggtgcatatttgtaggcatccatattaagaggttgcctttttgagtctagagcaggggtgtcagtgtttaaagtagacagtgggatagatcagtgtgggaaatgacgaccatgggagactgcagagcacaggtctcatcttgagtatttagattcacattttttataattcccacaaggaagcagaatatgtttttaatccaccagttggtgatcctagcctaccagttctgatcccagatcagaagagcttctggccagcacggtgactcacgcctgtaatcccaacactttgggaggctgaggcgggcacatcacgaggtcaagagatagagaccatcctggctgacttggtgaaaccctgtctctactaaaaatacaaaaattagctgggcgtggtggcatgtgcctgtagtcccagctactcaggaggctgaggcaggagaatcgcttgaacccaggaggcggaggttgcagtgagccaaggtcacgccactgcactctgacctggcgacagagcgagactccatctcaaaaaaacaagagcttcctcgaataaatgatattttaattgatacctaatcataggcaagggtggtggggacaggggattggggagccttccagccactggaaatagcaggagaattgtcaggagtgagtgtgctgaaggagggcacacccagaacatgacagggctgtgtgcagctgaagaccagagcttcaaaggaggataagaggtgaaactagtgtggccagaccacagaccttgcagatagtcatgagagaagtggcaagccatagagcagccagatttacatcttgaaaaaatgactcagctgggcacggtggctcacgcctgtaatcccagcactttgggaggccaaggcgggcggatcacaaggtcaggagatcgagaccatcctggctaacacagtgaaaccctgtctctactaaaaatacaaaaaattagctgggcatggtggtgggcacctatagttgcagctactctggaggctgaggcaggagaatggtcagaacccgggaggcggagcttgcagtgagccgagatcatgctactgcactgcagcctgggcaacagagggagaccccatctcaaaaaaaagaaaaaatgactctggcttctgtaaggagaatagcccatgggcagaccagaatagttgcgggaatacagttaggggttacaggtgttaatatcagaagtgctagtagattgacctaatgtcatgactaggaaatgggggatggatttaaggacacagaggagcagttccagagttggtaaatacatcagctggggcattgctaaaccatcagtttccttcacaactttccactaagccatgtgtcagctttgccttataggctggctccttttttatcagtgggaaaaattttcccaaaagcttctggagacttctcttgtcacatgctccttcttaaaccggtcgtgagcaagggagaaaataaggttactgtggttggctgagactagtccagattactcctgggtcaaggccaggcatgctagctcacacctataatcccaacactttgagaggctgaggcaggcagattgccttgatcacaggagttcgaaaccagcctgagcaacatggtgaaaccccatctctacaacaacaacaacaacaaaatacaaaaattagctgagcatagtggtacatgcctgcagtctcagctacttgggagatgaggtgggagtatcgcttgagcctgcggggtggaggttgcagtgagtcagattcactccactgcaccccagcctggacaacagagccagatcctgtctcaagaaaaaattttttttagatattcatgtgggatatggatggataacctcacagaataggaggtctggtaaaggaggaatggttattgggtcagtgggtcaccattcatatctgctccatgacagaagggcttagggggagtggtgagtgatgtcagatttgcattttgagaaaataactaactacaatatagagaatagataaaagggagaggcaagagttgaagtgggagaccatttaccaggcaagagttaacagaatagcttggaccctttttgggggctattggaaaaatagcaccatttaatgttcattattgattgataagatttaccacatcctgccaggcacagtggctcacacctgtaatcccagcactttgggaggccaagccaggcagatcacctgaagccaggagttcaagactagcctggctaacatggggcaatcccatcccatctctactaaaaatacaaaaattagccaggcgtggtggcacgtgcctgtaatcccagctacttggaagtctgaggctgaggcaggagaattgcttgaacctgggaggcggaggttgcagtgagccaaggtcgtgccattgcactccagcctgggcgacaagagtgaaactccatctcaaaaaaaaaaaaaaaaaatttaccacatctcacaagacagcactccagcctcagtaccatagctggatctgtgctaggcattgtactgttttgtaatctataatgccaactgcttctgggtgatggggtatgtgatcccattactatactttttttctgacaaattagttcttttctttttccataacattaaatttacataagcatgaaacgaattatttgtttggaggtaatattccctgagactccatggtaaggtatttcagtaaatccctggatggtgatggtattcctggaggcatgacaggtaaattcggatagatattgtggtgagagccatttgctgtgctaccatggcaaccgtgttcacgagctcattgggccagcactagggtagtgagggaaagggctgaccatcatcacctgggtttctagcaatgagtgccatcttgtgagcattcacatggaacataaatattttctttcttgtgctagttatccactacccagcgattggtttagatcctgacttccagtgagataagtggtgtgataatttgcttgaagttctcttcactaggagaatttctcttttatacacattcaaagccatcacttaagtagtataccccatagcagtctacttccagcccagcatgggccagcatgtttcaccaagcagtttatataccaggccggactttttcttcttcagttaactgttgatgtcaataggaagtcagaagtatctattgcggcagtgggttgtgtggtaggcattttatagagatcacttccagctgataatgggattctgctgggcatgtccaaatctatggctaattgaatctcataatacctagtttacgagaccggcccggtggctcatgcctgtaatccctgcactttgagaggctgagttggacagatcacctgaggtcagaagttcaagaccagcctggccaacatggtgaaaccccgtctctactaaaaatacaaaaattagccaggcatggtggcaaatgcctgtaatcccagctactcgggaggttgaggcaggagaatcgcttgaacccgggaggcagaggttgcattgagccgagaccacgccattgcactgtagcctgggcgacaagagcgaaactccatctcaaaaaaacaaaacaaacaaaaaaacccctagtttacgatggggagttgaagtcatttggatacctgtctgtgatcaggcttgcagtctctaccctagagcccagtactaggctaggagcatggtcttaccaataggatcatggtcttatatccatatccaaatattacgattcttctgtttaccttactacaaacactctagagctccatacaatctaccagagcttatttctctgtggcctggatcagcaggagcactttctcttttcagatcactcaataaattggtcagaggctgggcacagtggctcatgcctttaatcctcgcactttgggagatgaggcaggcagattgctttgagtccaggagctcaagaccagcctgggcaacatggcgaaagcctgcctcttcaaaaaattagctgggcatggtggtatgcacccgtagttccagctactggggaggctgaggtggggtattgcttgagcctaggagtttgaggctgcagtgagctgtgattgcaccactgcactgcagcctgtgtgacagagcaagatcttgtctctatgtaggtaggtaggtagattgattgattgatcagatggattagatggattaaattgagagatcagagttggatgcaaggataaggtatctgctgtctccaaaactcaaaatggcccagcaagcattgctcctctttgttagcaggagaggggtggtggggcaaggggcaacaagttgtcttttatgttggaggagataccctgacgtgctgcaggcctttgactttcagaaaatttggctgaggtggcaggccactgtatttttatgtctgacatgtacatctaagatacataacttcctgcttttcatgtctcacattgatgtcattagcatagttgtcaaggtaatgtcctgtgaaacagacaaaatcttgatgaaccagatcacaacacagaaaggtcaagatgatttatcactgaggctgctcttgccatgagcaagaaaaactgcttcaagtagtccacacaacttaaaaagaacacacacttacccctagcagtagtctaggtaccaggagttatatgttaatctgcagaaagtagagtacgtctggaaaagtaactgcaaatctgcaaagtcttctgtagcacttaagatcctgcggttcacatggagacttcgccttttgctaaagagatcactgctctaggagcttacatttgctctttctgtgatggttcttatccagtgggctagggaatctgtgtgtctttgggcattacctaatggccaatgttattgaaaatcaaggtggcacagagggaggtctagccaacttcacagagccgggagcatctagtttctttccctcccttttggaggccctgacagacaggcaggcaggcagacagacagatcgacagacaggtaagatagattagatagattaataggtcctaatgtgaagccacctcaggccaaaattccttccatcagctggcctgcaaaggctccgttctaactagcatatcttagcgacattctgagttcctagcaagtagctacctcaaggccaggacctagcagaccccaaaagatgcatttccctttacctagtacagttgccatggcaaatatctgcagattattaagaaaagatgaggagggaggtttataatatatgtgtgttaatgcgctgtggcagggttcctccttacagatgcctggcctccctgttattgaagggttctgggtctgaaatgacccaggcctacgagttggatgagggggccccctctctagcatggtggtctagtaggctgcctaaactgacctggaaagctactttccgtttccattactgggagcttcacaatgaattattcacagccataaacgtctgatcatggtctccaacagtctttctagcccacttagatcaggaatcccattttgaaatagtcccttccactagcatctcacgctgctgaggacagccaggaaagcacttctgaaagattccagtgctttcctcaccagtgtatagcctcagcaaggcatgtgatgtggatcccatcaagggcatactgaaggtgtcagtagaaggctgagcctttagagtccatatgccactctggtctcctctactttgtgcccaggtttttctggcttttcattatcacctcactaaatccagcattcagtccaggtttccactggcgagcctagctcaacattaaaaccatggccagttacctgagctgttacactacctgcagaagttcttttgaccataccataattagaaatttggctttatccaggctgggcacaatggctcatgcctgtaatcccagaactttgggaggctgaggcaggcagatcacttgaggtcaggagtttgagaccagcctgaccaacatgctgaaaccctgtctctactaaaaatacaaaaattagccgggcatggtggtgagtgcctgtaatcccagctactcgggaggctgaggcaggagaatcgcttgaacccgggaggcagaggttgcagtgagccaagattgcaccactgctctccagcctgggggacagaacaagactccatctcaaaaaagaaaagaaatttggctttaaccaagtcatactctcccttccttgttataacgtctccaaaatctatatcaacaattgttcctatcatttgtaatgatccagctcagtgaattcctgtagtttcttctggatatttattagctctttactttttttcccccgctgtagagacggggtcttgttgtgttgcccaggctggtcttgaactcctgatctcaagcagtcctcccaccttggtctcccagagtgctgggattacaggcatgagctactgtgcctggccagcattttacttttctaccttatttatgcattttaccctcaggtcatgttatgcttgcattctggtaatgtgtgggcaatgcaggctgggttgtggggcagttttcatcatgacagcaagatgcagtagagagcataatagagatttttggaaattaactttctttgggtcctctcttttatcatcatttctgttgtctcacttaaagccttatctttctcatgagcaacccaggaaagatgtgaattctgtggcattaaaattcagcaactcgcaaaatttggaaaccttaacatttcacttagcaaaatacatatatagtaatgtaaaggccctgagtcttgggttttcatttcaaggtgagcatttgatattggagctgggttatttcttgttttgttctctaatattgtcagaagtaatcctactccttggtttcaacatttcccctctccttttaattgggacacccctactcgtttaccaccagcttgaacacatcacaggtaattgcaagcaataactaaaatagtagttgtgcagctatgaactgtgagcagcttgctctttcccatcctggcaattggttgtcagtttctttccttccatctgaacccagtaacatcacccacgtttcccctagcagtctctcaactacaacccactctgatagtaattgctaaatcagttaaggtcctctagttaaaagcaagagaagtcacctcaactaaattaagcaaaaacaaacagaactattgatttgggaagacactggaggagctggcagaatcagaaggtaagttggagtaccaagtctcaggtagagccgaccttggtggctttggggcccttctagggaagcccctgcttcttcctagttttcaaaatcctgggagagaatctgattggctcagtatcagtcaggtatgactgtgtttggatcagtcagccctgggagagaagaggagaaataacacatagggcaaacaaaccaatttgtgtctactgtcatagaataatatttttagtaaccatcagatggggaaggcctttctaagctacttagaagatttagatgccagaatggaaaagtttgaaagatagcaaatatattaaaatgtgaaacatctttgtgacaaatgatgtcgtaaaaaagtggccaactgggagaatctatttgccataggtagacaaagaatgttccagaatatacaaacctgtgagtaaaaggtaaacaatccagtcaagaaactggcaatttacagaagaaatacagatggtctataaagatatgaaaagaagatcaactatatctagtaatcagggaaatacagattaaagctaaccattattttggacctatcagatttgaaaatttaaaaagctttatatcaaatgtggacaaaagtatggggctgcagagacttacaggtgggggagtttaaattggtattgcattggagggatgattctggcagtaccaatcattatttaaatgtttgagttttctgaccaagcttctgagattcttaacagaaaaagccatgtacaaagatgtttatgacagcattatttataatagcaaagaagataaaaacgcaaatatctgtcaaatagaatggccagatgatttcttatatccattatgatattctatactatcattaaaataaatgtgttcacatagatctctaagttatattgttatgtgagaaaacatatgtgggataatttcatttttgttttcaaaaatatgtatatctgtgtgtgtttgggtatgttaatgcttttttttttaagtctgaaagactacaaattgtcaacagtggctgcctacaagggggctggaagagaggagagacataatagggaactttgttttctactaaattatttgacttaaaacaagcatattctttttataatatttttaaagcagatttttttgaatatgggaaataaatctaatggacttagtttgcttcgatggatatataacatctagaataaagaagttcctatgcctagtttgaactgtgtcaggagtcttgtggtcaggtctctataaaaagggatatcaccaaatgggatgttgttctggagagaaactggaccatgggggtgaataactaaaggaacaacactcataggacatgacagctgttttcagatatgtgacaggctaaaaggagactgtagcatttccgtgaatgcccacctgattagaagttctaggctgtggctttcatcctaattacaagctggagcttttttgttcaccagcatttgtctttctaggaatcattgaatttattcaaaagaaatactttgaaaaaccactcagaagcccccattttcagggaaaattgaggtctttaaggcattatcaaggtttaaaaagaaacaaaaagataaaattgtgttagcttctggctgggtgcagttgttcatgcctgtaatctagcactttgggaagccaatgcgggaagattgaggccaggagtttaagaccagcctaggcaatgtagcaagaccttatctctacaaaacaattttttttaattagccaggcgtgatggcacatgcctgtagttctagctactcagggggctgaggtgggagaatcatttgagcccaacacttggaggctacagtgtgagctatagtgctaactttatagagctgcaggagctacagtgagctacagtgatcaccgcactgccctccagcctcctggctaccagagtgagactctgtctcaaaaaaaaaaaaaaaaaaaggcttagctcctgagaggaatgggataggagagaaagaaaagagggaaagaggtgaagccagtgaaatagtcagaatctgtgcgatgtgagatgtgaccttcctcaggacctcacatctcttagattgccaggtgaagaaggcatgtgtgtgtcactagtgatgggactgagtgtggcatctgagttgagatgggtgaaatcgcctctacattgatgagttgtcccaaaataagtgaatcagagtcacagtcctgtgggaattagcaggaactgtgacaagggctttggaattccactgtccagagagttgggagtttgcgttttgcaaggggcagaaaagatgcccgctgacatctgggttttacattgcttagtacgagggaaatgcaaaagaaattgtgtgtctgggtgttgggtcgttttaaacagaactgttccaagacctaccttggaaggtagtaaatttcccatcactctagtgttcagtcactggtgactattgggtgagagtattgaaaggagattcagacttaaaagtgaatgagattcagacctgtactggagatctaggcaagaaaagaaaggtataaggattgcaaaggaagggacaaaatataaatttttcacagaccaaatactgtcttcagaaaaacccacagattcatcagacatattatagaattaatatgacatattatattatagaattaataaatatgacatatttataatttattatatatgacatatttataattaataaatatgacattatagaattaatatgacatattatagaattaatattcatcagacatattatggaattagcaaggttgctagatacagaagcagcataaaaatttaatgcatttctatacataggccacaaacagaaaacctaataataccttttaaaaggtgccaattacaatagcatccaaatgtaaagtacctaggaatggatttaacaatttagagaaaattattaaaatgtttgaagacattaaaggaaaatagcttaaattagtgaagagataggatcaatggattaggaggctcaattttgtaaagatgtcaattctcccccaagatatatagattcaatgcaattccaataaaaatcccaacaggtttttttgtggaacttgacaagctgattctaaaatttatatggaggagaaaagattcaagaatagccaagacattcctgaagaagaagaacaaggtgaggagacctgccttaccagatataaagagattataaaattttagtaattaagacagttttgtattggcactgggatagacagatcgaccagtggaatgaaataaagagcccagaagcagatccatttgtaagtggaaacctatttatgacagaaatgctcttgcagtttgggtggggaaaagatggtcttcacaataaatagtgcctgggaccattggtaaccctgtgggaataaatgaaattgaatgcttgtcacatatcaaacacaaaaaccaattccagttgctgtaaacactgaaatttaaaggacaaaaatgataaaatgtagagatcataatgtagtaaaatatacttctgatctcacagtaggaaaggatttcttaagacttaaaatgttgataaaagggaagattgatgaatttacatgaaaatgcaaaacctctgttcataaatgataccataaagaagatgaaagggaaggccacaaccttggtaaaagataacacaggtaactgataaaggaagagtatccagaatatataaagaacttctacaaattgttaagaaaataagtaggctgggcgcagtggttcatgcctgtaatcccagcactttgggaggctgaggtaggcggatcacaaggtcaggagttcgagaccagcctggccaacacggtgagaccctgtctctacaaaaaaatacaaaaaaaattagccaggtgtggtggcgggcgcctgtaatcccagctacaggggaggctgaggaaggagaattgcttgaacacaggaggtggaggctgcagtgagccaagattgcgccactgcactccagtctgggtgacagaacaagactccattttgaaaaaaataatccagtaggacaacggggaaaccacttgactaggtacttcacggaagaggaaactcttttgaccagtatgctatggaaagatgatgaacctcattaataatcagagaaatgtaaatcagttaacacaaagtctgacagtagcaaatgttgataagcatacggaactggaacactacattgctggtgggagtataaattagtacaacttctttgaaaaacaatttggccttatctggtaaggttaaagatacctatacctgaaattcttgcacatatgcacaagaaagatacaaaaatgtgtctcaaagcaggacctttaactgtaaacaacccaaatattcatcagtagtagaatggataagtaaattttaacaccgtctcaaatggagcactacaaagtagctgaagttagcagccaggatgaatcttaggaacgtaatgttgagccaaagaaaaaagcaactcaccacttaatcatgattccattttcctcaaaaactagactagcaataataatacattgttttggatgtaaaaaatatgagatacaaataaaggaatgtaatgataattataaaacttcaggtttaccagtgagaggggaaggaagaggatataaggagaggagcccaaagagagcttctaagttaaattatgtgatggatactttttaaaaaataaatatcaacaaatgtgaaaaaaaaatttttttttaaccgacatgtctttaaaaaatgaatgagtacttagccttggttccagttaaggcttaaacaagagatgaaacggtcttcgatgccacctagtgtttctagagagtttaacattttatagacttctgctctagctgctccttcctagctctgtgagctaggtttttcagagtagaaaccaaaaggagtaggattcaccttgttttcatccgtgacgcaggctcttcattctgaacctttgcatctagcgctgtgttctccagggcaagccctttcttctctcttgttaaacaatggctcctgtttcttcctgactctttttaggagccttagtccacctggagacctagtttttctttatcatgactgagggagctagggatgctgatagggctgtgagatgtagtctttgttattcctgacatttttgtattgaagactgttttcaagagtcttgctgtccctacgtctgttctacattttagagaagggatgcacaggaaaactagtgcctctggattagccatcagggcttaaaaaactgacatctcatcctgccctgtacttgggtggaaacctgtggaaatcttatgtgaaggaagagaatgcaaactgtgggtgaactgagaaattctgatctaaaataatggtctctactgcgtgtgtaagagtccagcccaggaaaatcttttcttccttttgtggtattcacagcatagggtcaggggtaattgcctctgttagtaaaataacatgcagaacctccagggttttaatctgaaaggaaatctcttgagtaggtgagggcagatggattttgaggtcctaatttccctatctttgggtctttcactttaatttctcctatcactgtcatgctggtttccagtaaatatatttgctcctttcttaaagctcttgcttcccagcctgggcaacatagcaagatccacctctacaaaaataaaaattaaaaaattagccaggcatggtggtgctgtgcctgtagtcccagttactcaggaggctgaggcagtaggatacctccagcccaggagttcaaggctgcaatgagctatgatggcgccactgcactccagcctgggtgacagagcgagaccctgtctccaaaaaaaaacaacaaaaaactcttgcttccatctgacaaaaaattggttccctttgggttggcatttcctttattcagtctttttttaaattattatcaaagacagaaacgttcattcttcatttctgcctcttgctcttcccagtccacttttgccttcattccatctccaaatgtagtaatttttttttttttttttttttgagacagagttttgctctttctgcccaggctggagtgcaatggcgcagtcttggctcactgcaacctccatctcccgggttcaagcagttctcctacctcagcctcccaagtagctggggttacaggcatgtgccaccatacctggctaattttttgtatttttagtagagatggggtttcaccatgttggtcagctggtctcgaacaccagacctcaaatgatccacccgcctcggcctcccaaagtgctgggattacaggcgtgagccaccgcgcctggcccaaatgtagtaattctaattccagaatatgtctcaaatgcatccatttccttgtatcatcatttttccatgcttctcttcttgctcctctctagtccattttccatacaataacaagtaattctttaacatggaaaatggatcacactttaaaaaccttcaatgatttccttatgcacttaacataaaatttgaactccctattcaaggacctacctggaaatggatgatctgactttgccaggctcatctcttcctacttcctcctgccatccccatcaacctcaccttctgcgtgatacctgcactgattttcggttcctcacacaaccaagccttcttccacctctgggttaccacagatgctgttctctgtgtctggaatactattttctatactcatccttcctcagagagacccacctgtaatccaaatttggtgctttctgatacttcatctctagtagcattctgttctttgattgcattcatcatggtatataattatatatgtatttgttttatttgtttaatgtctgcttttcacccacaagtttatattgtccttgagggcgagaactgcacttatatttgattccccactctttgctctgtatctagcccagtgcctggtaggtacaaaatatatatttgttgaaagaatgaatgaaaagtaatgcatgaattgttcctctactgctgaatactacggttgttctcagttttgggtcattctaaataatgatgaagtaaataattaggacataaagatttttatttcctaagggtatgttctcaaaattgaagttgctaggccaaaaagtatttttgaaaagtttttttaaggctcataaaatgtaatttccaagtcacttactcggaattagtgttggaattttaaagtgcctccctttttgctttcttgtttgtttttatagtgtcagagtctcactgtgtcactcaggctggagtgcagtggtataatcatggccttgaactcctgggctgaagtgttcctcccacctcagccttctgagtagctgggactacaggcatgcaccaccatacctggctatttttttttttttttttttttttaatgtagagacgaggtcttgctgtgttgcccaggctggtctcaaacttctggcctcaagtagtcctcccacctctacctcccaaagtgctgggattacaggcatgagccaccacacccagctccttttttcatccttaattttgaatatatgaaacatacaagaggagaacagatcaaataataaaatttagcttcccactctgataaaactcatttatttgaatacttattctttgctacacatgagattatttccttatgtggcagatgttgttgttccaattttatgtatttatttattatttatttttgagacggagtctcgctctgtcgcctaggctggagtacaatggcgtgatcttggctcactgcaacctccacctcccaggttcaagcgattctcctgcctcagcctcctgagtagctggggttacaggtgtgcaccaccatacccagctaattgttgtctttttagtagagacagggtttcgccttgttagccaggctggtctcgaactcctgacctcaggtgatccacccgcctcagcctcccaaagtgctgggattacaggcgtgagccacttcacccggccccaattttacagatgaggaaactggacctagaaattttaacagatgtgctcaagttcatacaaacacagactatctcatgtcagatcattgtgtgataacctccctgcactaactaatctacatttgctccagaactgctgcaaatttaatgtcacctcacccaaatcttctgcttcttaactgctgcatctatatgaatgccctcccacccacccaccagtccttgcttccttgccacatgatgctagaggctggggtgccatgcccccttagatccctaggaagagattaaatcagctggccatccagaaccttcctgtgtggttcactctgagatgcatgtcatctttgtgtggtggtaattagcatgaggataaatggcccattccttcaggtatgtccccattccaatttacaagggtaggcccttttggcccagtatcataacaacaggctgctaaccacatagtaatcatggaaagagcatgctatacttacataacagaaagggcattctgccccctgaggattcttgtgttgttgaactctaaggagcttgtggctgtttcgggggagaggagcattctctgtgttaggctgcaggtattcacctgggcccatgtttttccccccaggaaaaggtagaacatgctaccaggtcagggtttggtgcagcagtttgcatgtttgatgtttatccctgctaataattcctctaatttctcttaacctttcaggctctccctgcatgtcctatccaggccacctgtgaggctgcttccaaggaggaaaacaaggaaaaaaatcgatatgtaaacatcttgccttgtgagtgtctttagtgtttcttgggatgtaacctgaaattacatctctggagggattttctgaagatggaaagaatcttgcaattgggcacagcagggtgaataacaagagtgcgttcatggcagtactcagtggctcatacctgtaatcccagaactttggaaggccaaggtgggagaatctcttgagcccaggagtttgaaactagcctgggcaatatagtgagacctcatctctacaaaaaccttaaaaaattagccaggcatggtggtgtgtgtctgtcgtcccagctactcaggaggctgaggtaggaggatcccttgagcccaggggggcagaggttgcagtgacccaagatcgtgtcactgcattctagcctgggtgacagggcaagaccgtgtctcaaaaaaataaagtaaaagaaatgaaataaataataataaataagataaataaataagagtaggttgaagactttgggctgaaagagcctttatggatcccacatactcagagtcaattaggatgatccaggaggatttttgtgtcaggcctaaagtttctaggaggtcctggagaacagcttcactaggatcaggcaggaagcagggggtaatggtggtggtagagatggttttttgtggtattcattgaaagaaattctaatgcagagttctctgtataaacccttcccagagttagccattgctaatcagttgatccataagctaacagacatttttctagtccattggtatccagaatgggatatgcataatttaatgagatatgagaggaagatgtttgaacctcacttgatttttatatttgcttttcaaaaaaaaaaaattcctaatcctcagaacctgtgaaaatgttttttttttaattttttgtagagatggtcttgctgtgttgccttggctgatctcaaactcctggcctcaaacagtcctcctgctttggtctcccaagtgttgggattacaagcatgagccagtgagcccagccagtatatttgccttttaaaaattcatccttttaaattttttatttcatttatttttttagagacagggccacccaagctggggtgcaatgatgtgatcatagatatgtatcctcgaattcctgggctcaagtaatcctcctgccacagcctgctgagtaactagaactacaggtgcatctaccatgcctggctgattattttttagacacagggtcttgctgtgttacccagcctggtctcaaactcttggcctcaagcagtcctcccactttgacctcccaaagaattgggattacgtgcatgagccaccacatctagaccctaaaaattttatatttcagggtatatcatacattagcatatgtgcataatttatcaataaatgagcatgtattagagatgcctgctcacatttttataagtgaagtatggaaccaaaaaattaggaccactacactatgcatttacagatacttttgtctttttcttttttctttctcgctctgtcacccaggctggagtgcagtggcacgatcttggctcactgcaggctctacctcctgggttcaagccattttcctgcttcagcctcccaagtagctgggactacctataggcacatgccaccacacccagctaattttgtatttttagtagagacggagtttcaccatgttggccaggctggtctggaactcctgacctcaagtgatgcaccgcctctgcctcctgaagtgctaggattataggcgtgacccaccatgctcggccttgtcttcttatttatgtgcacatgttggaggagggggatgtgtgtatgtgtgtgggtgtgggtatgtgtatatataatacatattttttaatatgattggtatactgtacacatttctctcttttaatagtatatattgtcagttcatctgtcaagaaactttcttttttctcaactacttagtattccacattgtagatgcatcttaatttatttaactagtcccctaatgatacttaaggtattcccaattttttgctgttatactgttggagttatattgttggagtggcatctttatacaagcgtgagtctgtgcacataggcacagatgtctcaactgtcctggttgcgtcaggttctgtgagaaataaattttgattttactgaaatattgttggtttgtttcctagatgaccactctagagtccacctgacaccggttgaaggggttccagattctgattacatcaatgcttcattcatcaacgtaaggatcgggtgctttccctgtcacttccctgcctgaccattgccactatctgttggctcctccccagctgtgtgttaggagaaatatttgtcatttcatgttttccctgacaagtctggtttttttaagtgactgaatttttttttaaggtcagtcaaatagttttaatcattttctatatttaccctgtcgtcattccctatggtttcccatgtagaaatctgtgtctaaatatgtattttgtgataagagtcagtgaatcctttattgagctgattctaattacaaacaaaagcaggccttgccctcaacagtaaaaataagggagaacaggacaagaatacctgacatgacaccagctatattatatatgtgtgtgtatgtatatatgtgtgtgtgtgtgtctgtgtgtgtgtatatatatatatatatgactatctggttagccatatatgaaccaaggcctgagggaagagctgatactaagaggaggtttttaaagatgatttagagaatgtttatagaacagtctgtatgagagatttgaggtttttgtttggttggttttgtctttggcagtagcctgaaaaaacacataaagagttaagaatatgttttataggtttgggggaagcatcctgtagagagagtgaatttgaacagaaaaaagagagagggaaagctggcaaaagcaagtctgactcctgatgcaaaatgcatgagaagactggataaaatttccacttgcatgtttatagcagcattaatcctaaaagccaggtgggagcactccaagtgtccattgacggatgagtgaataaattaaatgtggtacatgcatacagtggaatgttattcagcctttaaaaggaaggaaattctaatacatgctacaacatggatgaacctggaagacatcatggtaagtgaaataagccagtcacaaaaggacaaatattgtatgattctacatatagaatataaactatatatacatatgtagagtagtcaaattcacagggacagaaagtagaatagtggttgctgggggagggaggaatgaggagtgggtacagagtttcatctggggaagatgaaaaagttctgtagacggatggtggtgatggttgcacgacagcgtgaatatacttaatgctacagaactgtacacttaaaatggctaaaatcagccgggcacggtggcacacctgtaatctcagcactttgggaggccaaggcggtggatcacttgaggtcagaagtttgagaccagcctgaccaagatggtgaaacctcatctctactaaaaaaaaaaaaaaaacaaaaaaaaaaaaaacaacttagccgggcgtggtggcaggcgcctgtaatcccagctacttgggagattgaggcagagaattgcttgaacccgggaggcggaggttgcagtgagccgagatggcgccactgcactccagcctgggcgacagggtgagactgtctcaaaaaaaaagaagagtcaaaatggctaaaatcgtaaattttatgttgtattttaccacaagaaaaaaaaaggacactgatggagagattagtgtgaacataagaagggctgtttcttcctctgagagtgaagataaaggagaggacagaatggatagagacgactcgtaggtgtgggtaaagcaagttgaggcaactcacccgtgtgctcatggttgtgtactgaacaaatgagatgggactgtgacatgagagcttcgaaagtttagaacagcttctgaggtccctgagaaaaggataccaaagagagaaagcaaaggacatgtctagtgggatgtcattgatgggggtggggggtgctgagttgtgtgattttttttttcttcatctgcaccctgggattggtggtaaatgcagaggacatgtggtactcagacaaaagggaaggtcagtggctgcttcaagtagtcagccaagggcttcagtttcagtagaaaagaaaagcgttaggaagttgttaggaataaacaactattcctaaggtggtaggattgaggaactggagatcttgagaaagtgaaagaacaggaggttgtgtccaaaaaataggctattagatggacttcaaaaatggggcagtccgggcattctcactggagtgaatttgctgaagttcctgtatgtatgtttaacattaatggttacatgtttgtagttttaaggaaagggaccctgactagacaaataattgttgtagtcgataaggaaaatggagaaaggctagtaatcagcaggaattcctagaacttacatcgaagatcatgatgaagagattaggtggaataggttgactttaatgttatgcagaagagaagagcaagatcagttagtgtgtccagctgcgggtaagagaatactcaactaaaagttgtctagatgggaacattttttttttttctggagacagtctcaccccgacacccaggctggattgcactggtacgatcttggcttactacgacctctgcctcccgggctcaagcgattctcatgccttagcctccctagtagccaggattacagacatgtgccaccatgcccagctaattttttgtatttttagtagagacggtgttttgctatgctggccaggctggtcttgaactctgagcctcaagtgatccacctgcctctgcctcccaaagtgctgggattacaggcgtgagccaccgtgcccagctggaacatttatttgtctcatatactgtgaaagcaaatggagaccagttcttgagttggctgattccatgggtcagtgacatacttacaaaaccaggtgcttccatctttctactcagttatccttagccctgtcaacagtctcatggccacaagatggctgcagcagtcccaagcattcctcataaacacagcatccagccgggtgcggtggctcacgcctgtaatcccagcactttgggaggccgaggcgggcggatcacaaggtcaggagatcgagaccatcctggctaacacggtgaaaccccgtctctactaaaaatacaaaaaattagtcgggcgtggtggcgggcacctgtagtcccagctacttgggaggctgaggcaggagaacggcgtgaacctgggaggcggagcttgcagtgagccgagatcacgccaccgcactccagcctgggcgacagagcgagactctgtctcaaaaaaaataaataaataaaaaataaaaaaaataaacacagcatccagcacagaagaggaacatatctgcctatgcttttctctctgttagggagcaaggcttttcacggaatcctccccaccaccctgtcctcaggaccagcaggccaggattggatcacatgttcacatccctctctaatcactggctaggacattgagaatgatcatgatttacccctctgagcctggggaatgggcaccttccaagccagtgaaaggttaatgtccaaacaaaattgtggctctaatggcaaagaagaaagggaggaatggatttgagttagtaaccagcagcatctgccaccgtaaccagtttggtcccttcccacattgaaggtgaaaactgacaaaagttaattgtatgttaaggctgttaagcagctgagatggggatctcttcatggtaatggcacagtagaaagaaacagccttatcccttgaccatgtttatttagagcttacactagggcattccataatgccttgatggttattagacagttattagtaggcagagtttacatgaagagggttaaatgggggaccttatgaactcagtgaaggaacaaaagcagggaaaaacctgtggttaaccataagtgggaagcagggattaaagatttggatttcacagtttattaaactcagtcaacattttttgagcacctgctgtgtgccaagcactgtgggtaggcttaaaggttacagaggtaagatgtaatccctcatatactacacaggtagttaggttgtttcctgtaatgtgctacgtgtgcaaaggaggtattgccaggttctgtggagttatgagaaaaaacattcagcccagcctggtaacccagtagagctcattattgaagagtgagtcagagttcaggagaagaaagttgggcagaaacttcaaagcaaaggagaaacatgagcaaagtcacagagactagaaacagcagtcttaggttataaggtataagatgggaagtggtgggaaatgagacttgatcttgaaaggtagtggatgtcaagtgtgtccattggagttcttacttgcagactatagagtgtacttttcatccactcttttaagcagaaaggggtttattataagatactgggtaccttaacaaaacctggggaagagccagtgagccaagctcagatgctgctcagcaaagagcagagcagctatagatctatgcagcatgtgactgtcatagtgaaacctctgcacagtgctgcagaagaactggatgcttctactaccgtgcttgcccaaagaccagatttctagcacagtcgttatctcatgttgctcatttctaccccaagtcttgtgtgggagcatctgctaggaagaagctaggtctcgtggattgctgagctgctagggagtctgggaaatgtagctgtaagatagtcaagctagaagggagcaggagtgggtactaagtgaaccacctaatagtgtctgccagttttcagtacagctgagcggttttgatgaatttatctaggccgtggggtaccattgaaaagtgttcaaggcagggagtagtgtgaccacatttacatattgatcactggggctatcatgtacaacatggatttaggaggggccaattgggggctattgcaatagcaggtagatcacaaatgatgagggttgacaaggaagcggcgacaaagtgaaaactacgtggaggtagaatttagcaggaattggtggttgatttatatatgagagagtagagggtgatatatccatgtagatgtatccagcatacagttggtcatatctagagctgtggacttggaagtaataaaggagtgggccaagaacagagcccttgggcccacagcccctgccaggcacattgaacaggtgctcatgggtgagatggaaggagaccaagagaagagagcatctgagaaggcaaagataaagcatggctcaggaagtgtttggcagtgaagagggttatgtgcagattagagatcagtgggaaagaggaacagattttctttggacttagtgtgtagggcagcatcctttgctgaagcaaattcagaggccgtttgttgcatcctttttgtgggctgctagttaacacttatcaaaccctttttttcccctaacattgaggtataatatatataacataaaattcacccattttaagtgagaattcagtgattttttggtaagtttaccaagttatgcagccatcaccataaatgtcttagaacattttctaacaactttattgagatgtaattcaaataccatgtatttcacccagagtttacaattcagtgtttttttaagtatattcacatataactgcagcccatcaccaattttagaacattgtcatcccctcaaaagaagaaccttacactctagctgttgcccccttagttttagaacacattgctcaccccaaaaagaacctcagtgtctaaatacaattaatctccattctcaccccccggccatcacttaactttttgcgtagagaactgagaccacacacatggatcttgaagggaactaggcaccatggagtagtggtgaaaggcctaggaaagtggggtctgtagtttgggaaacacataggtcagctaacctaacactgttcacaggaggagatgaaacagaggcagtggcacagttggcaggtgggcttccagcctagagccttaggagaaaccagtttccttactcatttttagatgtctaagaatatataggatttttttttttttttgagacggaatttcactcttgttgcccaggctggagtgcaatggcgcgatctcactacaacctctgcatccggggttcaagcaattctcctgcctcagcctcccaagtagctgagattacaggcatgcaccaccacacctgctaattttgtatttttagtagagatggggtttctccatgttggtcatgctggcctcaaactccctacctcaggtgatctgcccacctcggcctcccaaagtgttgggattagaggcatgagccaccgcgcccagcctagaatatataggatctttagacgtgtttctttttagaggtaggaatgtagctaccacctagagcccactgagattcagctttcagaatctagagacatctcaggagccagggagccacatttcatctttcccttgaacagaacacaagatcagtggctttgcttcattctcattactctgtattagttaagcagtgccgccacatcactgtacaagcatgttttcaggaaggcatatgacgcactcctggtaagatggggcaggaagcactttggggctgggccttccaaccaggtgttcaggctgttcagggcccgcatgctgcaatgagaatttagcagtgactcctcatggagcaggaatatgatgcgcttaacgtattcttaaggacttctcagttttaattataagtttagtaatataagcagaatttaacatccagaattaaggctatttccatttccattctctaataaataaaaacatttgttgaaacttaaattgctcttctcaatgaaaactttaacaagtcttttgttgctgactaaacatatccatctctgaggcctaaagctttctccttctgtgttgggcagcaaccctgccctgcccttgtttgaactgaaattgaaagtggctcctcagaccaggcacggtggctcacacctgtaatcccagtactttgggaggccaaggtgggcggatcatctgagttcaggaattcgagagcagcgtggccaacatggtgaaaccccatctctaatttttgtaaaaatacaaaaattagccggccgtgatggctcatgcttgtgatcccagctccttgggaagctgaggcaggagaatcacttgaacccgggagcagaaggttgccgtgagccaagatcgcaccactgcactccagcctgggtgacagagcaagactccgtctcaaaaaaaaaaagaaagtggctcctcagatttaggccacttcttatatttggccactgccttgcagccttgtagttcacattgccaccctggtgttggtgtgacatggtgtcccatccctgaagctgcctcccttgttactcaccttattgctgtctgagaaaggaaatgggtgattcacaatccttaaatcaagtggctttctcttacctagaacttctgaattgaacatacatttaaacaatgacgttgaaaagatgtataactggagcaataaagactgaaaaagaaagctgcggccagttgttagtttttccgaggctccttatctgttgagtggcaccccaggctcccttgctcttgtcccccactgcctgtgatagagaagcctcttgttaaacactgggagctacttcaccacactcacaggctattcccagaaagattttgcacctgggtaaagcatccttgagaaaataacctgttttctttcccagagtgaacccagcttcatccctggaaccaccacatatgcttttcccctggtgggttcttaacctgttaacactgaaatctacattgttagctgctgataaagcatcagaaacatggtctaatctgggagtcagtatttggatttcttttttctttctttctttttcttttttttttttttttggagatggagtcttgctctgtcaccaaggctggagtgcagtggcgcaatcttggcttggctcagtgcaacctccacctcccaggttcaagcaattctcttgccttagccaccctagtagctggaattacaggagtgcaccaccacgcccggctaatttttgtattttagtagagatggggtttcaccatgttggccccatgctctcacactcttgaccttagatgatccgcccaccttggcctctcaaagttctgggattacaggtgtgagctaccacgcctggcctggatttcttattctagtatttattaataattcaatttgagaagactacctagactatttgagttttgtaatctctaattcctagctctaaagctaatcccttgtgaatatctagactggaaatccccgttaagtacctgcacattttcaggttttgttaactggttggagtcagactggagaatttcatttctattcatttttggttttctctttctttttctttccttccccacaccccagggctaccaagaaaagaacaaattcattgctgcacaaggtaaagtaatgacaacttttttctgttagatttaaccatgatcacataatgggtttggtttttttctcccaaatgctgagtggattaaccagaatgctgtagcttttctgtactttttaccacctgaaagaattataatccattatacaggtttacagctaacagccttcatcttgatgacttagtatccagggatccattaaaagaagtctttttgtgtatgtatattaaaaagactggaaaaggctgtatacacaaaacacagtctaataaggccctctgtccttggggctagttaaccttaggttccagccaggctgctcagagtttgaattaggaatcagtttccagagaggatcagccacctcacagggtccaggctggttctcccccagctcatgggcctgagcctcaccattattcacagatagttggtctaggaaccctcagatcagggacccagcaccatgtcctttatgtgttctacacacatttccaggcctgctgttctaacaactgtcttcactctttgaaccctagcaaaaatatctggatgtttgcagcattaaaaagtaattgaggccgggcagggtggctcatgcctgtaatcctaacactttgggaggccaagacaggaggatcgtttgagcccaggagttcaagatcagcctgggcaacatagtgaaaccccgtctctactaaaaattagccaggcgtggtggcacacacctgtgatcccagctacttgggaggctgaggcacaagaatcacatgaacccgggagccagaggttgcagtgagctgagattgcactactgtactccagcctgggtgacagagtgagactttgtctcaagaaaaagagtcattagggactacaagatttataaaaacaaagttctcctcccttttcttttcacttttttagtctaatgcccctggggcaaccatttttatctattggcttcttatgatagatgacatcatctgatccccttacagagcacctccccctcagtcagacagacgtgtacccacatatcctccccattctcccagaagagtcaaatcacaatttggggttaaggtatttattattattatgagtttacaaatattcacagccgaaacacacagtattatgttattttttgtatagtttttttcccccttcttttttagtcattgtgttttttatatacctactactgattttcctcccaaactctttaccagaagtatatatcttctctcagtacctttagatacatgaggtttaatttttttatcttgggatccttctagaatcttctttcttcagttgcattgtggattggttgctctctatcctctggcagagttatcattctaagaccagtaccctgggaattccgttagcctctctgctgtgttggatctcatttattttcctctgtttgcctctcatttttgtttagaattttctagtgactttccgaaaaaggttatatgggaggtaaattttgaattctagcctgaacaagtcatccaacctttctggggctgatgacacccacctcagagcataataggaaggagtaaatgccatatgaagcacttagctcactgtcaggtccataatgtaggtattctgtgagcagtcatgatttctaattcccaactgtaatatccttgggagacatcattcgtgttctgtttatatttttgacagccttccacccagccccatccttgtgcagtgcctggcacatacatggtagaaacatggaaaatactcaattagtaacggggtggatggatacatgggttagatatttagctggggacatttgggcacaagcttccaaaagtcaggaatggatgttcccagcctcccagcatctttcttcttggtgtatattctcttcatttttgctgttggctactttaggaccaaaagaagaaacggtgaatgatttctggcggatgatctgggaacaaaacacagccaccatcgtcatggttaccaacctgaaggagagaaaggaggtaagtggaaaaattggatgtgaacagcagaaggatcactctgcatataagctctgagtttaagcctggctgtctatcctttgtgggtgctgtaccagtagttcatccagaaagacacaggctgaagtctatcagactttgctatggcctggaagccccagatatgaacctcaggtgtgtgcctagagcacattccctgtatttggtagtcaaacaactcaccctggttccagaacagcctgaaagagactgacttgggccatcagctaaggaaaagccacagaggggttttttttgttgttgttttgttttgttttgttttgtttttttattgatcattcttgggtgtttctcatagagggggatttggcagggtcacaggacaatagtggagggaaggtcagcagataaacaagtgaacaaaggtctctggttttcctaggcagaggaccctgcggccttctgcagtgtttgtgtccctgggtacttgagattagggagtggtgatgactcttaacgagcctgctgccttcaagcatctgtttaacaaagcacatcttgcaccgcccttaatccattcaaccctgagtggatacagcacatgtttcagagagcacagggttgggggtaaggtcacagatctacaggatcccaaggcagaagattttttcttagtatagaacaaaatgaaaagtctcccatgtctacttctttccacacagacacggcaaccatccgatttctcaatcttttccccacctttcccccctttctattccacaaaaccgccattgtcatcatggcccgttctcaatgagctgctgggcacacctcccagacggggtggtggccgggcagaggggctcctcacttcccagtaggggcggccgggcagaggcgcccctcacctcccggacagggcggctggccgggcggggggctgatccccccacctccctcccggacggggtggctggccgggcagaggggctcctcacttcccagtaggggcggccgggcagaggcgcccctcacctcccggacggggcggctggccgggcagggggctgatcccccaacctccctcccggacagggcagctggccgggcgggggggctgacccccccacctcccggacggggcggctggccgggcagaggggctcctcacttcccagtaggggcggccgggcagaggcgcccctcacctcctggacggggcggctggccgggcggggggctgatcccccaacctccctcccggacggggcggccggccgggcgtggggctgacccccccacctccctcccggacggggcggctggccgggcggggggctgacccccccacctccctcccggacgaggtggctgccgggcagagacgctcctcacttcccagacggggtggctgctgggcggaggggctcctcacttctcagaccgggcggctgctgggcggaggggctcctcacttctcagacggggcggttgccaggcagagggtctcctcacttctcagacggggcggccaggcagagatgctcctcacatcccggacggggcggcagggcagaggtgctccccacatctcagacgatgggcggccgggcagagacgctcctcacttcctagatgggatggcggccgggcagagactctcctcactttccagactgggcagccaggcagaggggctcctcacatcccagacgatgggcggccgggcagagacgctcctcacttcccagacggggtggcggctgggcagaggctgcaatctcggcgctttgggaggccaaagcaggctgctgggaggtggaggttgtagcgagccaagatcacgccactgcactccagcctgggcaccattgagcactgagtgaacgagactccgtctgcaatcccggcacctcgggaggccgaggctggcagatcacttgcggttaggagctggagaccagcccggccaacacagcgaaaccccgtctccaccaaaaaaatacgaaaaccagtcaggcgtggcggcgcgcgcctgcaatcgcaggcactcggcaggctgaggcaggagaatcaggcagggaggttgcagtgagccgagatggcagcagtaccgtccagcttcggctcggcatcggagggagaccgtggaaagagagggagagggagaccgtggggagagggagagggagagctgttttgttttgttttttgagacggagtctcgctctgtcgcccaggctgaagggcagtggtgccatctcggctcactgcaagctccgcctcccgggttcacaccattcttctgcctcagcctcccgagtaccacccgccaccacgcccagctaattttttgtgttttttttagtagagacggggtttcactgtgttaggcaggatggtctcgatctcctgacctcgtgatccacccacctcggcctcccaaagtgctgggattataggcgtgagccaccacgcccggcccacagaggagcttttttcccctggtttctctagttccttatttccctggttttctgccccacctgctgaggcctttggtatatcctggatcagcagagggagctttatgaactgagaccctgcaagccaaagggaatttgaggccttggcctaatcctggaggcagcctcctaactgggccttttccttttgtggctaccaagtgcatgcctggcctaaccagctctatcactgggccacagccagagccaattctgggtcctggggtcgagccccagcgaggaatacctatttgttaccgtgtttctcaaggatggcccttgagtcaccttgatcctagggtatcgggtgtcatgatcaacagctccacagtggcatgggaagacagtgctagggctgggctttaggttagtttcctccaaccaaacctcttgctcttggaagctatccaaagctcaggcaacagaaaaagctctaggcctctcatggcaggtttacagtctgcatcagtctaccctggtggccccctcatagcagactgctggttcgaggggttcaaacaggctttctcctagagcatgacctgaaatgttgtgaaagtgcagattttgtaggtaagatggcttcagattcgccctgaaccaagggagtgtgggtgggaaacattgagaagtatggggctagggctgtgtgtaagttaggagactgtgctcaataggatggcggctaaggaacttgagaaaagggcaaatttgaataagtaagtgtgcaactgactgagatagagaagaggtcaaagggccttctgggggactttaatctgggctttgtgggctcttccttccaggccctttgcatctgccatgggcaggaggtctaaggtcagggaatgtatgtctttttctttccagtgcaagtgcgcccagtactggccagaccaaggctgctggacctatgggaatattcgggtgtctgtagaggatgtgactgtcctggtggactacacagtacggaagttctgcatccagcaggtagtgtctcctctgtcctttctcagttcttatgttggatctgctgaccagtaagagggaacaggctggatcatcccgctgtggtcaggagttgctgagtatgcagtatgtgaattctgaaaccagatatccgggctcaggggaacttgtctgtcaaagctaaaggagcagtattttcatgactggtgaaaaattacctgttgagatgaagtctgatcatttagatatgaccaagcactgtggaaagggagcatggggaggcagtgcagtctcctaggtgcttgactcacctttctcctcctttcctactccaaagactcctgacatcaaggatgtgatgggcctgcccctggccctccaggcaaccctggagacctgagcaaaggtcaccttcagccaaggggcagtgtggtactgcgaaaagaggacttagctgggagcactgcattttagttctgaccctgccactgactagttgtgagaccttgtgtctgtggttaactaactcccctgggtacacttacttttccattgtcactgacaaccacagctgtcaccttccctcccctggtactgcccacccttgggtatcagggccaacacacaggatctcctcacttcacaggtgggcgacatgaccaacagaaagccacagcgcctcatcactcagttccactttaccagctggccagactttggggtgccttttaccccgatcggcatgctcaagttcctcaagaaggtgaaggcctgtaaccctcagtatgcaggggccatcgtggtccactgcaggtcagtgtggcctgacccttgtacccccacccccacatttcgcccccatggccagagcaggggaacagcacaagggccctggctgaggaggctggcacagagtagatgacctactggggcaccagcgcaacagccagagactccaagttctagtgcagggtggagaatatgacttgaggaaggagggtagggcagtcctccaagattaggagttgggagaccctgctatgaagccaaaagactgggtcaagtgctggccatgtatttttgcagccttcggacccttctagctggaggtcaggattcaggacatactggagttgttggctcctggagagccccagctctaccccattcagaattaggatttagaccctgaaggaagagcccctgcctgtgttgcccctccctatctgctcccacaaggcaggctggccatccctataaccccctgctctctggctacagtgcaggtgtagggcgtacaggtacctttgtcgtcattgatgccatgctggacatgatgcatacagaacggaaggtggacgtgtatggctttgtgagccggatccgggcacagcgctgccagatggtgcaaaccgatgtgagtgatctgtgggtcaggtgagggtggggggttccaggactaaaacatctgcccacattgaggattcactcagtctcacaggttattgtaaatgattactatagagtgtgattgtgggggaaagaaagatagatcacactgttaccgtgtctatgtagaaaaaggaagacacgagaaactccattttgttctgtactaagaaaaattcttctgccttgagatgctgttaatctgtaaccctagccccaaccctgtgctcgcagaaacatgtgctgtattgactcaaggtttaatggatttagggctgtgcaggatgtgctttgttaaaaatgtgtttgcaggcagtatgcttggtaaaagtcatcgccgttctccagtctcaagcacccagggacacaatgcactgcggaaggccgcagggacctctgcccaagaaagcctgggtgttgtccaaagtttctccccactgagatagcctgagatatgccctcgtgggaagggaagggtctgtgctgaggaggattagtgaaagaggaaggcttctttggagttaagataagaggaaggcatctgtctcctgctcgtccctgggaatggaatgtcttggtgtaaaacccgatcgtacattctatttactgagataggagaaaaccgccttatggctggaggtgagatatgctggcggcaatactgctctttactgcactgagatgtttgtgtaaagtcagacataaatctggcctacgtgcacatcaaggcacagcacctttccttaaacttatttatgacacagagtcctttgctcacatgtttttctgctgaccctctgcccaccattaccctatagtcctgccacatccccttagccgagatagtagagatagtgatcaataaatactgagggaactcagagacgagtgctggcgcatgtcctccgtatgctgagcaccggtcccctggcccactgttctttctctatactttgtctctgtgtcttctttctttcctcagtctctcgtcccacctgacgagaaacatccacaggtgtggaggggctagcccctttcatgtgatgaagggctcttataaattatgtattcaaagaaatcgagcacagaggaggttgtggtttcatgcctgggagagtcaggaaggcagatgacaggttactggacttcaaagattagggaacaggcagctgaaagagccagtgcccagagacatgatgaagctcggccacatctgggagcagcagtgagattggctctgcagttggggcatagcaccaggagggaggcagggaccagactatcacgggctttgggtgtctccagtttctgacagccccttcagactattaaatctgcactctcagaatgaacaggaattgagtttgtccttctctccaggcgtccaccacccccaagatagacctggacccttcttcccaagtaaagcacccccacagggactcctgcatttcaagtcccacttcactaaattgggataataagagggagtccttttattcctgctaggatcaaaggagaaatggactggagtgaagtgggggtgggaacaggtgatctggcatgagaactatgttgtatgtaaccaagaacttctgtgtcattcatgtttcagatgcagtatgtcttcatataccaagcccttctggagcattatctctatggagatacagaactggaagtgacctctctagaaacccacctgcagaaaatttacaacaaaatcccagggaccagcaacaatggattagaggaggagtttaaggtgagttggagctggataacctccttcagattgaaggatccttgtaatctggggaacatgggatgcctgactgtgcatttgccaacagtaaatccccttgtgaggcatgccagtggttaaggagatggtcctttcctcgtactctggtaactctcaactcatcctgcacgttggaatcactttggttgtgttagagtagggagaagcaggcaacagtattttaaggcccctagccctccgaggtgattatgatacacagcaagagcagttttttctgtaagagccagataataaatattttaggctttgcagcccacatggtttctatccagctacttagtgctgtctttgtaacacaaaggcagccataaccaataggtaaatataatgagtgtggctgttttataaaactttatttgcaggcagcaggcagcaggccagatttggcctctggaccttagatcactgatagctcctatatgccactagacaatggttctcaacacacctaaggcatatgtcacactgtcatcagtaaaagtgctctcccaggctgggcacagtggctcacgcctgtaatcacagcactttgggaggctgagacaggtggatcatgaggtcaggagttccagaccagcctggccaatatggtgaaaccccgtctctactaaaaatacaaaaagtagccaggcatgatggcacatgcctgtagtcccagctactcaggaggctgaggcgagagaattgcttgaacccggaaggcagaggttgcagtgagccgaaatcatgccactgcactccagcctgggcgacagagcgagactccatctcaaaaaaaaaaaaaaaaaaagtgctttctcagaagcaggagattctgggttggggtggggaggaccacttagagaagttcttctcaaatatagcatgtgcacagatttctttgggatcctgtcaagatgtgggttctgccaggcacggtggctaatgcctgtaatcccagcactttgggaggccaagtcaggcagatcacctgagctcaggagttcaagaccagcctgaccaacacggagaaactctgtctctattaaaaatacaaaattagccaggcatggtggcacatgcctgtaatcccagctacttgggaggctgaggcaggagaatcacttgaacccaggaggcagagattgcagtgagctgagattgtgccactgcactccagcctgggtgacagagcaagactctgtctcaaaaaaaaaaaaaaaaaagatattaggttctgattcagcaggtatgagttagagcttgagattctgcatttctttttttcttttctttttttttgagatggagtttcactcttgtcacccgggctggggtgcaatggcgcgatctcagctcactgcaacctctgcctcccgggttcaagggattcttctgtctcagcctcctaagtagctgggtctacaggcacgtgccactacccccggctaatttttagtagagacagggtttcaccatgttggccatgcgggtctcaaactcctaacctcagttgattgcccaccttggcctcccaaagtgctgggattacaggcatgagccaccacgcccggcttgagattctgcatttctaataaggtgaagccaacgctgctggtgtatgggctacactttgagtagcaaatgtcaagaaggagcctcaatcgggaagggaggatgcaattctgaataagtttttttgaagagccttaggcagcctctgggggtggaactgcagagtggacacactccctcctacgatgctggaatcccttgctccaggatcacaaaattccaagccaggagaatctcaagagagtccacaggagcctggaaggtagcatttcccaaacagtctcttggcttcagggttccagctgaacatatgggaacagaggtcagggccctggtgagaagagcagtatggagccagagtggcctggaggtgcaggccaagggacaggcataatcttgtcaagttcagttactgggatcagtaatgtttcccctccccttcccaattcagaagttaacatcaatcaaaatccagaatgacaagatgcggactggaaaccttccagccaacatgaagaagaaccgtgttttacagatcattccatgtaagagccctcccgccactccaaagccttattgccccatccctcaattccctccaccccttccatttctcaggtactagttaatgattggcgtatagacaagaatcatggcattgcctcttgttgcacccacttaacaacatggcgttgccttttgttgcaccttagtggcttctggaaataacgtaaaagccaaaggctttctccctaatgagctaggaacagacatgtccttgcccagctgggattctgtctgcccagggcctgaggtgggagcaatgcaaggagagggagaggacaaatgatattggctagccataagccgctattcttcttacagatgaattcaacagagtgatcattccagttaagcggggcgaagagaatacagactatgtgaacgcatcctttattgatgtaagtggtgggtgtgacccctgagcccccaacaccccgtggagattcagccagcacttgcagtgcctccctcccatacctgctggggaggatcatgtttgaatcagtcaacaaatagtgaattgatactcacccacccactcaccctgtgcattaggtctgtccagctccatagagcagaaggtgggggaaaacagatggcatgcagtagtataatacctggaagaaaaagttcacagagcagaccacagccaagaggaacctggctgccccctgatctttcccattcctgccctcttcatcctagctctaatccctgttccacttccctgtctcttacagaaagcaaccagcttgtcagatagggtttcgtccttggccacaggggagctctgcatgggctgagtttgcctccgagcagtccccattcccttctagtggtctgtcttctccactagtccctctgtgattaaaccatctcacccttgcaattaacctggcctgtgcagggctaccggcagaaggactcctatatcgccagccagggccctcttctccacacaattgaggacttctggcgaatgatctgggagtggaaatcctgctctatcgtgatgctaacagaactggaggagagaggccaggtgagttcaaaaggtcctgggtggtgagagacagagacagcatgaaaagatgtgtgtgtaaatggggacgttgggaaggcaagaaggtgtttggaccttgtctttgacttatacggtccaaagagtacgtttgcatagtataagtacatacttaaaggtatataaatacatatgcatttccaggattgcccagcccgttggtgtctaagcagtcattagcttctcccaagactagaaaagcaatgtgatctgagcctccatgttattcccagacagctcacacccttgcactttctcctgaatacagtccccctagcctagcctttgcacagtgccccaggcggggggggcaccctctccttcccagtgccccaggcagggcagataggtcaaggttctgaggtggacccaatatgagtgtccctaagaagggattgcctcattgctgactacataaaataaagcagtagaatttgagaaattatacaaacaagaaacttacagtctaatattcagtaataaggaaatcttttaaagaaaaaagccctcaggtctattaaaaagcagagctgtccggaaactcatactaaaaagggacactagcagtcccctaggtcaacttcctctcagtataggaaacctcctaatattgttcctgagtcagaatcatacagcctctactaagcacattcaatctcagggatatctccctcaccccccacattatggggggacccagtctgtgttctgacaatgcttattcttttaaaaattatttctgttgaggttgcacattgcagcaaatgagcggttcactatgtctggggtgtcacttagcagggatgagaatctagagaatgggcctggagagaagctagcaaggcctggtgagaaaattccttctaagccacagtgaagagtttggtcttcctaaagcaattgaagagcccttgacaacatcccatttgtgttttttaaaaaatccctctggcagcagtgagaaggactcattagaaatgcgaaagctgtggcagtaatgctggtggcctggactcgggtggtgagagggtgctgtcccagaaagggtgaagtgaggaggaattaaggatggcacccactcatgactcattgaatttatagtcaaacatttaaaatacaaagtatgttttacattagttgtctcaagtcactagttgttccccatctgtacttgtgttaactttggtacaaggctttacacatattttctcaccctgatgtttcattacatcaggattttttttttttttttggttttgtttgtttgtttgtttgtttgagagagggtctcactttgtcacccaggctggagtgcagtggcacgatcttggctcactgcagcctcaacctcccaggttcaagtgatcctcccacatagccctccaagtagctaggactaaaggcacgtgccaccatgcccagctagtttttgtatttttttgtagagacagggtttcaccatgttgcccaggctggtcttgaactcctgggctcaattgatccacccacctggttgacccaaagtgctaggattacaggtttgaaccaccttgcccggcatttttttcaattttgatcagtcatttaactcattagctattcttcctagacttgtatcatgtacctaatcaacagacatactttgtaggtcttcatcatcttttttttttttttttttgagacggagtctctgtcacccaggctggagtgcagtggcacaatatgggctcattgcaacctctgcctcccaggttctggcaattctcctgccacagcctccctagtaactgggattaaagacacccaccatcatgcctggctaatttttgtaggcacggggtttcaccatgttggccaggcttgtctcaaactcctgacctcaggttatctgcctgactcagcctcccaaagtgctgggattacaggcgtgagccactgcgcccagtgtcttcatcatcattaataacaatactgatgaggtgggaggttcggttaaggtgcttggctttgcactcaaggaagcacacacctgagtaacaaaagctgtttaggaaatgagccactgtgttctcaggagctaggtgcctgttcctgccgtctctgatcagtcgtgatggaacctgcagatcagaccagggccctacctgtggttccttctgcacccctgcccttcagatctgtgatgggcaggaccaaagagcaggccgaagagctggaaccacgagcacaaggaccatctcggcccactgccctgtgataaaatgtggcccagtgaacatctccgcctctgtccagtcagatgcaggctcttccatccttgaaaaggacctagtgagagtaaagggcagggggcaggaagcatttcatgtgtgtggcggtggggagaagagtcgtgcgcacacaaattctgctgcctgttgagtgaggcctctccctctgccttccactgtagcttatgctctgtcttcctaggccagtgaagcagacagtagtgcttgccctcaaaagcttctgagtggattggaacaggatgttagtgatgttctttacaaggcctcactggcccccaagttcactttctgttccattcatgttgtcaagtgtagctcccagaagtaattaacgcactaagcctaaatgatgcaatgaaaggtgcctacacttatacagtgacactaccatcctcacctacaatattaagttcccagagaaaaaaattcgatcccataatataaattctgtacttacaaattaaaatctcgaaggaattaaaaatttttaattatctccctctgctttttttttttttttttttttttttttgagatggagtctcactctgtccaccagactggagtgcagtggcacaatctcagctcgctgcaacctccacctccagggttcaagtgattctcccacctcagcctcccgagtagctgggattacaggcatgcactaccatgcccagctaatttccatagtagagacagggtttcgtcatgttggccatgctggtctcaaactcctgaccccaagtgatccgcccgccttagcctcccagagtgctaagattacaggcatgagccattgcgcctggcctccttctgctctattttaatcaaaagggtccaccaggatgcctgggttccctcagcagctgcagcttggaccatcatcagcctgggcagacagagcagtgccaggaactcccatgctgggtcaaccctaggcctagcccaaccctaggcctcatcctgcttctctaaagcatagtgaaacctgatagcattagtcttcacaaagctgtgtgtccccatcaccatgtccgccttagacctcataagagacataagacataagagacttcatgctatctggtggaaagacaaagtaggagaaaagacagaaaaccttccctgtttcacttctttaagatgctattatctagaggccgtaacgtgaacacacaaatctgagatgaaactccagtccccagcttttcttctactggtcttgaatccccattccccatcttctgtccctcacccactgatgactttaacacctggcttactgctccttttgagcccctgttcctgactctgcttttggaggcatcagtcaccatgtggatgatccatctatcctcaatctttctattcctcagcttcctcagccacctgatcccatggtcaagtcaccatctgccctgtatctgcactgcccttggaatctcaacaaggcatccgccctgtttactgcctccttcctcccacctcagtattctcttttattccagtcatttttgtcttcatcaagtccttagagttattgatgcctccactttctcaacatcagtcacaccgaacatgtcctcaccttcctccttactctgtgtgtttttgagttctgtttttgagcgtttgagttttctgatttgagtttttgtggtatgtcattattacctttccttattccctcatgctttcttactttcatagcaaactctctagtaaaacccagttatatgcctctatctgatatagcaaacatcactgggcaaaaacacaaaacagtgccaaatgctctcacactgaactcatgaccacaaatctcatagaggtaattggtgccacctagcaatgctattgctctttcttttcttcctgaaacctccagcatctgctcttgcctgtcccatcatactcacaccttagcttgtgacctggcctcattcttctccaagaaatcagacaagaacactgtcatcctcccacccccaaacaaccagcctcttcaaatctgtaccaactctattctctcttgttacagtggaaaagggtttctgcatctctcaatccacctgtccactgtgctcttggccccattccgtcctgcctgctcagggatgttgctgctataaccatcttctctcccacctccatcagcagttcccctctttaaccactactctcatcagcctatacatgttacatttcctatcttttaaaaacaaaaaatctgctaatctcactttcccttccacctactatcctatttctctgcaccccttcccagcaaaactcctttaaagagttggctttcggccgggcgcggtggctcacgcctgtaatcccagcactttgggaggccaaggtgggcggatcacaaagtcaggagatcgagaccagcctggccaacatggcaaaaccccatctctactaaaaatacaaaaattagctgggcgcgatggtgcatgcctgtgatcccagctactcgggaggctgaggcaggagaatcgtttgaaccagggagctgaaggttgcaatgagccaagatcgcgccactgcattccagcctggtggcagagtgagactccatctcaaaaaaaaaaaaaaaagagttggctttctccctgcaagttctctgttcgctctgttccttccaggcttggccccactgggactgctttagtcaagatcaccagtgactgtcctcttgccaaatccaaaggtcatttctcttttctgatttttttttttttgtccttacagcagcatttgaaagagtcagtacctccctcctcttcctcagaacacttacttccgtagcatcaccccactcactaacctggcagctcctttgttatttctttgtgacctcctcctctaaaacattggagtatactagactcgggcgctagcccactctgttttcttttgacacactagcccttcaggatctcagccagtcctatggctttaagtacaacccatatgccagggatcctcaatctgcgtctctaggccagtcacctgtcccccttcccaatgtgggctcctgatttcctccttcccccgacaccagtccaccccactcttagccatctaaataaatagtaccaccttctgcccagttgctcatgtctaaaatccgggagttaccttccttcctcccctctcctcacccctcacatccagtctgccactgagtcctgatacaggcagagcctccccacttttctccagcgtaactgctgtcatctgaacaagccctcgtctctcactgcttgcccgtgggactgtgggcatgactcatatgcgcagcctcgtctgcagtggcctggcaactggtcctcctgctctcatcctaacccacttttagtttttcaaatggcagctgctggtccttttgaaaatataaatcattgtcactccttgtcttacaaatcctgtttgaggccaggtgcggcagctcacgcctgtaatcccagcactttgggaggccgaggcgggtggatcacctgaggtcgggagttcgagaccagcctgaccaacatggagaaaccccgtctctactaaaaatacaaaattagcgggcatggtgatgcatgcctgtaatctcagctactggggaggctgaggcaggagaatcacttgaacccgggagccggaggttgcagtgagccaagatcgcgccattgcactccagcgtgggcaataagagtgaagctccatctcaaaaaaaaaaaaaaaaaaaatcctctttggtcttccagagatcttgagagaaaatccgcccatgtatacaaaatttagagacttttgatcagatgtggtggctcacgcctgtgtaatcctaccactttgggaggctgaggcaggtggatcacctgaggtcaagagtttgagaccagcctggccgacatggtgaaaccctgtctctactaaaaatacaaaaattagctaggcatggtggcgcacacttgtagtcccagctacttgggagtctggggtgggagaatcacttgaaactgggaggcggaggctgcagtaagtcaagatcatgccactgcactccagcctgggcgacagagcaagactctctcaaaaaagaaaaaaaaaatgagactcttagtgttgatacctagtccctagacttgatatgtatttctgtctgagagatcatgctcaattcctccagcacacacacactgtggctcacacccatggggaccttatggttctgatggttttaaaggcccagtcttcatcccagctgagacactgtgtaaagcagtgttgagaaggcactgtggtagcaaaatccattccacccaccagtgccataaaaactaatataatgcctgatcgaggtgagccttaatgagaatttttttttttttttggctgttctggttgaagagaggcccagggcaccgatccctgaggcatccccagggcttctagagaacatgggtggaaaagcactagtccagggcatgttcttgattcaacactttaataatcatgattttatttggactgtgagactattcacaatttctttttctacttaatttttttccaaatctttcaatgacattatatgtatggttgagaatttttcaattgccagtagtgaagaatctcagatcttacccccaaattctctaaagaaatgggcagcataactgtgtgatgttatatttatgtatttatgccttggcttgttctgcagacattgaacaaattcatttaccagatactgagagcctaccatgtgccaggcattgtgcaaggtgtggggaatacagagatgaaaagagacgcagccactcccacaaggagctgtagagggaagtgagccaggtgcaagcaaagacagacagtagaccacctcctgctcactagcaaggacagaaaggcgagtgctagcaacttgaaggtaccttgcagatcaaagagataaaggtaaaagggagaaaggatactgtggcctgggcggtggtgaagcccatggctgtgtgggaatgtgaattggttctgattttctgaattagcagtctggcggatgtaagcagcattaaatatgaaaacaccccatgggagaaaaagaaaggaattggaacaaagattttcactcgtcctcctctccctgcagccaccaagtattggataccctgtgagcctgtagtcagagtcctttacagaccccggcagtgttttagatggtctctggtgaggatcggaggttaattggaatgatgtgatataatgatcctgcaagttttcaataccttggggacgaagcgtatcagcgtaagaggtggctgtactgagaggggtcaggctgctcgtgggcagtgctgcttctacacatgtggtactctgagctcctcacctctccaacctgtctctccaggagaagtgtgcccagtactggccatctgatggactggtgtcctatggagatattacagtggaactgaagaaggaggaggaatgtgagagctacaccgtccgagacctcctggtcaccaacaccagggtaagatgggtcgtgggtggactctgcccacaggaaaagcagggttacccctgcctccctgatccccttttttccaaaggagaataagagccggcagatccggcagttccacttccatggctggcctgaagtgggcatccccagtgacggaaagggcatgatcagcatcatcgccgccgtgcagaagcagcagcagcagtcagggaaccaccccatcaccgtgcactgcaggtatggctcacccttgccctcagcgggagagagaaagcgaggaggggcagataggggaagctgatgaccatgggtcagactgaagaaagccatacaagagcaagatattggtgagcacatagtagttgagattgatgccaagacaggattggatgctaagagagaggaccttggagcttgaacttggcacaataagtgctaggggactaatgttcagatagtgggcaggagagcagcaggggagactggcagtggagaccccggttgtgctatgaacagagggtgaaagagaagaggagtcaagggtgtctcccaggtttgagcctgggttggtgtgaccagcagaagagagacagtaaagaggtttgtttgaggggaaaagttgaattttgtatggggcatgttgctggaggttacgttttagaaaaaatgcactcctttacttagaatcctaacaacagcttacaaggcccaatatgttctgaggggtccctggccagggccgggagaggatggtgtgcaccatgggctggctctgagcacactcctgccatgggcctgagatgccagtttcccaggcagccacagggctttgcccaagccttccctgagtaccctgccagaactcccactcctcttttctctttccttaccacacatcttcttgtctggggacattgctaaaccccacagtccctgcctcagagtaggcactcagtgtctggtgagtgaatcagctgatgacattgaatagggggatattgtcaaggtcagagtctggattccgtggatttgggaagaaagtgaaagacatggaaaggaatcagcagatacacaccagtgtagggagtggggtttgtcagaaaaagggaaagacaggactagagctagttctaactgagcgaacagcaggtcagaacaacctaggccagcatgtgcaggtggacagcaatggctctgtgctggtggggtgtgagtgaaggtcgtcccccacggtccaacaggtgagtccctccacagcacatggggccatgcaggaagggcacagggtacactgcctcccgacccagaacccctccaggctggtgggtccacagggcaaaggcgagcaccagctgcctgcccccacctcttctgccactcaccactgtcactcacccccttgcacagagggccatcacaggtgtggtaaatgtgtctgctctgttgcagcgccggggcaggaaggacggggaccttctgtgccctgagcaccgtcctggagcgtgtgaaagcagaggggattttggatgtcttccagactgtcaagagcctgcggctacagaggccacacatggtccagacactggtatgctgcccacatatttgtccctgccaccacaccacctgcagcccttctctcagggaggaggctcttcagaggggcccacccagtagtcagaagactgtctaaacacagacctgcccttgccctcccaaggtgccccaaatacacaggaaacattgggaggcaggatggcagcaatgggagcatagcccctgttgccagaggttgggccaggttagaaggggtgtctgggtgccccacagggctcatctgtacttctctgtgggtcttgggtaaggaagatccatgaagagtacctgcctttgggcttgggctccctgttaagaggtctgactttaataagccgcacatccacagaggttttcctgaatcccatggagctagaaatgtttggggggtaaagaaaagtgaatgttaggaggtttgggagacgaggttctgagagccagggtgcatgctagcctggcagccatggtaagcgtgggccatgctcagctgcactgtctcccagcccagcacatgcctgtctgacctctgtggggcctgggtcagctctggtcagctctgcttgtagaaggtctgctgcattcagcccggaaggggaatgctgtcagaactctggcaggcagatcagagctcaggtgaaagttcaaaaacattcagttcctcttgattttccatcttcaacaaaaaaatgagtctgttaggaattacaggtactgtgtgttcttcagtaaccctgactttttccctacctttcactctccaggaacagtatgagttctgctacaaggtggtgcaggagtatattgatgcattctcagattatgccaacttcaagtaagcggcaacaagggtccgtggaccaggaggattgcctttaatattttgtaatattctgttttgttaatataccccaaattgtgtatatatcttataactgttttagaaattggtacataggcttctattacctattaggtggaaattttatatgtaaatgtgttagcactgatagtcctttttccaatgttttattggggaattaaatagtgtgatgtttggattgatatcgtgaaatcctcagccgagaaattgggctggattgtgctttggttaatacatctttccctaaagaagataaacacaaaatccattccaggtagctcggcaccaactaagaaaaaaagcacaaagttctcagagctctcgaggaaagtggttgtccccgtaccaccatgcactgtaaatatccctcccctctctccctggtcccctcccccatccccaccactgatatcatggggagtaataggaccagagcggtatctctggcaccacactagggactatcaggtaataaaagctttgactccctgaggaaatgtctctccctttgtctgggggtggggcagccatacaggctggggctctcctcggctgttcatggccctcctgttgctgttctctctgagttatctgagagaggccacagtcccccagctcctcctgtccaccaaacacagcccttccagttcttaggtgatctccaggaccctcctttcattcccagcacatctttggtttagtggtcctggccagcctccctccctaggaaggtggccaggtcctcactgagtctccttaaggacaggggcacaggggagactagagctggctcagctttgggctgaggccagtctgacctctccagtctgtggtgctttgctacaaaactgtctggattgtgtcaccctatctaggataaatctttatgtccacatatattgtgttgaattgttcccattttctttcatacgtgtcctcatttctgggacagtgtgaatgtttctcagatctagaagtcagatggtgggagtcttagatccgaacttggttttgagtgacatgttagacaaaagtgttgaacttttgtttcttaaagaagctggatgttcatttatgtctcccgtaacagtctgtgctgtccagagacccagtatccttaggatattattctcatcctcatggttgaagctgggtcactgccatgtccat

SEQ ID NO: 28 - DNA, 20 bp, Artificial Sequence
  Antisense Oligonucleotide
ttggtgccacagaaagagaa

SEQ ID NO: 29 - DNA, 20 bp, Artificial Sequence
  Antisense Oligonucleotide
ggctgaatgttggtgccaca

SEQ ID NO: 30 - DNA, 20 bp, Artificial Sequence
  Antisense Oligonucleotide
agggccaccatcaccgcaat

SEQ ID NO: 31 - DNA, 20 bp, Artificial Sequence
  Antisense Oligonucleotide
actagcagagaggacagggc

SEQ ID NO: 32 - DNA, 20 bp, Artificial Sequence
  Antisense Oligonucleotide
cttaaaccttaacatgtaca

SEQ ID NO: 33 - DNA, 20 bp, Artificial Sequence
  Antisense Oligonucleotide
acaggtggcctggataggac

SEQ ID NO: 34 - DNA, 20 bp, Artificial Sequence
  Antisense Oligonucleotide
gcctcacaggtggcctggat

SEQ ID NO: 35 - DNA, 20 bp, Artificial Sequence
  Antisense Oligonucleotide
ttgatgtaatcagaatctgg

SEQ ID NO: 36 - DNA, 20 bp, Artificial Sequence
  Antisense Oligonucleotide
cgtactgtgtagtccaccag

SEQ ID NO: 37 - DNA, 20 bp, Artificial Sequence
  Antisense Oligonucleotide
cccacctgctggatgcagaa

SEQ ID NO: 38 - DNA, 20 bp, Artificial Sequence
  Antisense Oligonucleotide
ggaactgagtgatgaggcgc

SEQ ID NO: 39 - DNA, 20 bp, Artificial Sequence
  Antisense Oligonucleotide
aggccttcaccttcttgagg

SEQ ID NO: 40 - DNA, 20 bp, Artificial Sequence
  Antisense Oligonucleotide
agataatgctccagaagggc

SEQ ID NO: 41 - DNA, 20 bp, Artificial Sequence
  Antisense Oligonucleotide
cgcatcttgtcattctggat

SEQ ID NO: 42 - DNA, 20 bp, Artificial Sequence
  Antisense Oligonucleotide
actggaatgatcactctgtt

SEQ ID NO: 43 - DNA, 20 bp, Artificial Sequence
  Antisense Oligonucleotide
tggagaagagggccctggct

SEQ ID NO: 44 - DNA, 20 bp, Artificial Sequence
  Antisense Oligonucleotide
tccactcccagatcattcgc

SEQ ID NO: 45 - DNA, 20 bp, Artificial Sequence
  Antisense Oligonucleotide
ggcacacttctcctggcctc

SEQ ID NO: 46 - DNA, 20 bp, Artificial Sequence
  Antisense Oligonucleotide
tactgggcacacttctcctg

SEQ ID NO: 47 - DNA, 20 bp, Artificial Sequence
  Antisense Oligonucleotide
agatggccagtactgggcac

SEQ ID NO: 48 - DNA, 20 bp, Artificial Sequence
  Antisense Oligonucleotide
cattcctcctccttcttcag

SEQ ID NO: 49 - DNA, 20 bp, Artificial Sequence
  Antisense Oligonucleotide
ggtgaccaggaggtctcgga

SEQ ID NO: 50 - DNA, 20 bp, Artificial Sequence
  Antisense Oligonucleotide
gtgttggtgaccaggaggtc

SEQ ID NO: 51 - DNA, 20 bp, Artificial Sequence
  Antisense Oligonucleotide
ttctccctggtgttggtgac

SEQ ID NO: 52 - DNA, 20 bp, Artificial Sequence
  Antisense Oligonucleotide
tggaagtggaactgccggat

SEQ ID NO: 53 - DNA, 20 bp, Artificial Sequence
  Antisense Oligonucleotide
agccgcaggctcttgacagt

SEQ ID NO: 54 - DNA, 20 bp, Artificial Sequence
  Antisense Oligonucleotide
acttgaagttggcataatct

SEQ ID NO: 55 - DNA, 20 bp, Artificial Sequence
  Antisense Oligonucleotide
ttctaaaacagttataagat

SEQ ID NO: 56 - DNA, 20 bp, Artificial Sequence
  Antisense Oligonucleotide
agtgctaacacatttacata

SEQ ID NO: 57 - DNA, 20 bp, Artificial Sequence
  Antisense Oligonucleotide
agagctctgagaactttgtg

SEQ ID NO: 58 - DNA, 20 bp, Artificial Sequence
  Antisense Oligonucleotide
acctgctcccctgagcgtgt

SEQ ID NO: 59 - DNA, 20 bp, Artificial Sequence
  Antisense Oligonucleotide
gtgtcatgtagagacaggtc

SEQ ID NO: 60 - DNA, 20 bp, Artificial Sequence
  Antisense Oligonucleotide
ggaatccatgcttgttagct

SEQ ID NO: 61 - DNA, 20 bp, Artificial Sequence
  Antisense Oligonucleotide
gaccactgccgagcagaaca

SEQ ID NO: 62 - DNA, 20 bp, Artificial Sequence
  Antisense Oligonucleotide
tgctgcggtgctggaattcc

SEQ ID NO: 63 - DNA, 20 bp, Artificial Sequence
  Antisense Oligonucleotide
acctgtacgccctacacctg

SEQ ID NO: 64 - DNA, 20 bp, Artificial Sequence
  Antisense Oligonucleotide
tgttgccgcttacttgaagt

SEQ ID NO: 65 - DNA, 20 bp, Artificial Sequence
  Antisense Oligonucleotide
aatttctcggctgaggattt

SEQ ID NO: 66 - DNA, 20 bp, Artificial Sequence
  Antisense Oligonucleotide
tgggccaaaccttggctgca

SEQ ID NO: 67 - DNA, 20 bp, Artificial Sequence
  Antisense Oligonucleotide
gaacactcacagagtcgggc

SEQ ID NO: 68 - DNA, 20 bp, Artificial Sequence
  Antisense Oligonucleotide
cataatatattaagtacagc

SEQ ID NO: 69 - DNA, 20 bp, Artificial Sequence
  Antisense Oligonucleotide
gttgtgtcacctgcaacaaa

SEQ ID NO: 70 - DNA, 20 bp, Artificial Sequence
  Antisense Oligonucleotide
cagtacttactagcttcttt

SEQ ID NO: 71 - DNA, 20 bp, Artificial Sequence
  Antisense Oligonucleotide
tgaagaagtcctagaacacc

SEQ ID NO: 72 - DNA, 20 bp, Artificial Sequence
  Antisense Oligonucleotide
ccatgcttatctggaaaata

SEQ ID NO: 73 - DNA, 20 bp, Artificial Sequence
  Antisense Oligonucleotide
gtaggctcaccttaacatgt

SEQ ID NO: 74 - DNA, 20 bp, Artificial Sequence
  Antisense Oligonucleotide
gacaggtcatgcacaccctg

SEQ ID NO: 75 - DNA, 20 bp, Artificial Sequence
  Antisense Oligonucleotide
tttcttaaacctaatgagaa

SEQ ID NO: 76 - DNA, 20 bp, Artificial Sequence
  Antisense Oligonucleotide
aatgccttacccacatcctc

SEQ ID NO: 77 - DNA, 20 bp, Artificial Sequence
  Antisense Oligonucleotide
caggctggtttcgaactcct

SEQ ID NO: 78 - DNA, 20 bp, Artificial Sequence
  Antisense Oligonucleotide
ttaaagccaaatttcttttc

SEQ ID NO: 79 - DNA, 20 bp, Artificial Sequence
  Antisense Oligonucleotide
gcccagccccaaagtgcttc

SEQ ID NO: 80 - DNA, 20 bp, Artificial Sequence
  Antisense Oligonucleotide
gttgtgtcacagagtcgggc

SEQ ID NO: 81 - DNA, 20 bp, Artificial Sequence
  Antisense Oligonucleotide
ggtgtctcatctgaaggagg

SEQ ID NO: 82 - DNA, 20 bp, Artificial Sequence
  Antisense Oligonucleotide
tgaagaagtctagcttcttt

SEQ ID NO: 83 - DNA, 20 bp, Artificial Sequence
  Antisense Oligonucleotide
atccatgcttatcaccaggg

SEQ ID NO: 84 - DNA, 20 bp, Artificial Sequence
  Antisense Oligonucleotide
ggctcgagccacatccccat

SEQ ID NO: 85 - DNA, 20 bp, Artificial Sequence
  Antisense Oligonucleotide
acaccttgatggccagctcc

SEQ ID NO: 86 - DNA, 20 bp, Artificial Sequence
  Antisense Oligonucleotide
agcagcacctggatggtgag

SEQ ID NO: 87 - DNA, 20 bp, Artificial Sequence
  Antisense Oligonucleotide
ccagtgggccaggatcctgc

SEQ ID NO: 88 - DNA, 20 bp, Artificial Sequence
  Antisense Oligonucleotide
gttcattgctgttcagagac

SEQ ID NO: 89 - DNA, 20 bp, Artificial Sequence
  Antisense Oligonucleotide
cctcgcctccatggcgaggg

SEQ ID NO: 90 - DNA, 20 bp, Artificial Sequence
  Antisense Oligonucleotide
cccatgatatcagtggtggg

SEQ ID NO: 91 - DNA, 20 bp, Artificial Sequence
  Antisense Oligonucleotide
ctcagggagtcaaagctttt

SEQ ID NO: 92 - DNA, 20 bp, Artificial Sequence
  Antisense Oligonucleotide
gggctccacatcctcagtgc

SEQ ID NO: 93 - DNA, 625 bp, M. musculus
acgcgtccggcggcgagtgaggcgctgacagggactcgcgggggcatcttgcacagacccctggaccacgccgccatcgcagcctccagcccagtcctctctctgccgcttctcctcgccatggaggcgaggccgccgccgccgccgcggggcttcgagcagcggaccgggcggcggccctgaggggagcggcgggccgagacgccgccgcggtcctgaggcggagctgccgtgcgcgtcccccgcggtcccgcccagcgccgggctcggtcagcatggattcctggttcattcttgtcctgtttggcagtggtctaatacatgttagtgccaacaatgctactacagtttcaccttctttaggaacgacaagattaattaaaacatcaacaacagaattggctaaggaagagaataaaacctcaaattcaacctcttcagtaatttctctgtctgtggcaccaacattcaggccagacctgactctggagcccacctatgtgactactgttaattcttcacactctgacaatgggaccaggaaggcagccagcactgaatctggatgcactacccttgcccggacggaagcttgcttattgagaaccagtcacggatggccata

SEQ ID NO: 94 - DNA, 97 bp, M. musculus
ttgtttgcagatgaccactctagagtgcacctgacacctgttgaaggggtcccagattctgattacatcaacgcttcattcattaatgtaagggatc

SEQ ID NO: 95 - DNA, 140 bp, M. musculus
ttcattgtagtgtaaatgtgcccaatactggccagaccaaggctgctggacctatgggaatgtccgtgtgtctgtcgaggatgtgactgttctggtggactacacagtacggaaattctgcatccagcaggtacagtctt

SEQ ID NO: 96 - DNA, 156 bp, M. musculus
ctggctacagtgcaggtgtagggcgcactggcacctttgttgtcatcgatgccatgctggacatgatgcattcggaacgcaaagtggatgtatacgggtttgtgagccggatccgggcccagcgctgccagatggtacagacagacgtgagtgacc

SEQ ID NO: 97 - DNA, 114 bp, M. musculus
cttcattcagaaattaacttcaatcaaaatccagaatgacaagatgcgcacgggaaaccttccagccaacatgaagaagaaccgggttttacagatcattccatgtaagttctc

SEQ ID NO: 98 - DNA, 155 bp, M. musculus
acccatacagggataccggcagaaagactcctacattgccagccagggccctcttctccacacgattgaggacttctggcgaatgatctgggagtggaagtcctgttctatcgtaatgctgacagaactggaagagagaggccaggtgagttcaa

SEQ ID NO: 99 - DNA, 146 bp, M. musculus
gttcctccaggagaagtgtgcccagtactggccatctgatggcctggtgtcctatggagacatcacagttgagctgaagaaggaggaggaatgtgaaagctacactgtccgagacctcctggtcaccaacaccagggtgaggtggg

SEQ ID NO: 100 - DNA, 172 bp, M. musculus
tcttccaaaggagaacaagagtcggcaaatccggcagttccacttccacggctggcctgaggtgggcatccccagcgacggcaagggcatgatcaacatcattgcagcagtgcagaagcagcagcagcagtcggggaaccatcccatcactgtgcactgcaggtacgcgacc

SEQ ID NO: 101 - DNA, 191 bp, M. musculus
caccctcatctccctaccaagatcagccacctcaggcatggggagtaatgagaccagagcggcctctctggcaccacagcagggatcgtcaggtaataaacactcttgattccctgaggaaatgtcggtccctttgtcttgggcagagcagtcttatgaagctggggctctcctgggttgttcctagcccc

SEQ ID NO: 102 - DNA, 913 bp, M. musculus
cttcagtaatttctctttctgtggcaccaacattcagcccaaacctgactctggagcccacctatgtgactactgttaattcttcacactctgacaatgggaccaggagggcagccagcacggaatctggaggcactaccatttccccgaacggaagctggcttattgagaaccagttcacggatgccataacagaaccctgggaggggaactccagcactgcagcaaccactccagaaaccttccccccggcagatgagacaccaattattgcggtgatggtggccctgtcctctctgctagtaatcgtgtttattatcatagttctgtacatgttaaggtttaagaaatacaagcaagctgggagtcattccaactctttccgcctgtcaaatggccgcacggaggatgtggagccccaaagtgtaccacttctggccaggtccccaagcaccaacaggaagtacccaccactgcctgtggacaagctggaagaggagattaaccggagaatggctgatgacaataagctcttcagagaagaattcaacgctctccctgcttgtcctatccaggccacctgtgaggctgctccaggaagaaaacaggaaaaagaccgctatgtaaaacatcctgccctaagaacactctagagtgcacctgacacctgttgaggggttcccaaattctgatacattcacgcttcttctttagggtaccggacagaacaatcctcgctgccggaccaagaaaaaccggcaggcttcgggacggtcggaccacccgctccttgctgggccccgagagaaaggggtggcccaatgccacacggctgcacgagagcggtccgacataggggcaccagaagctcccggggggcacgagcagaacccccggagggcaagcccagagc

SEQ ID NO: 103 - DNA, 20 bp, Artificial Sequence
  Antisense Oligonucleotide
caggaatccatgctgaccga

SEQ ID NO: 104 - DNA, 20 bp, Artificial Sequence
  Antisense Oligonucleotide
gaatgaaccaggaatccatg

SEQ ID NO: 105 - DNA, 20 bp, Artificial Sequence
  Antisense Oligonucleotide
tcccctcccagggttctgtt

SEQ ID NO: 106 - DNA, 20 bp, Artificial Sequence
  Antisense Oligonucleotide
gtttctggagtggttgctgc

SEQ ID NO: 107 - DNA, 20 bp, Artificial Sequence
  Antisense Oligonucleotide
tcaccgcaataattggtgtc

SEQ ID NO: 108 - DNA, 20 bp, Artificial Sequence
  Antisense Oligonucleotide
aggacagggccaccatcacc

SEQ ID NO: 109 - DNA, 20 bp, Artificial Sequence
  Antisense Oligonucleotide
gtatttcttaaaccttaaca

SEQ ID NO: 110 - DNA, 20 bp, Artificial Sequence
  Antisense Oligonucleotide
cccagcttgcttgtatttct

SEQ ID NO: 111 - DNA, 20 bp, Artificial Sequence
  Antisense Oligonucleotide
tcctcttccagcttgtccac

SEQ ID NO: 112 - DNA, 20 bp, Artificial Sequence
  Antisense Oligonucleotide
aggacaagcagggagagcgt

SEQ ID NO: 113 - DNA, 20 bp, Artificial Sequence
  Antisense Oligonucleotide
tctttctaacaatggagtgg

SEQ ID NO: 114 - DNA, 20 bp, Artificial Sequence
  Antisense Oligonucleotide
gagtggtcatctgagagaca

SEQ ID NO: 115 - DNA, 20 bp, Artificial Sequence
  Antisense Oligonucleotide
tcttttggtccttgtgcagc

SEQ ID NO: 116 - DNA, 20 bp, Artificial Sequence
  Antisense Oligonucleotide
tcccataggtccagcagcct

SEQ ID NO: 117 - DNA, 20 bp, Artificial Sequence
  Antisense Oligonucleotide
cgtcgcccacctgctggatg

SEQ ID NO: 118 - DNA, 20 bp, Artificial Sequence
  Antisense Oligonucleotide
tgagggttacaggccttcac

SEQ ID NO: 119 - DNA, 20 bp, Artificial Sequence
  Antisense Oligonucleotide
ctttgcgttccgaatgcatc

SEQ ID NO: 120 - DNA, 20 bp, Artificial Sequence
  Antisense Oligonucleotide
gcccggatccggctcacaaa

SEQ ID NO: 121 - DNA, 20 bp, Artificial Sequence
  Antisense Oligonucleotide
aagttaatttcttaaactcc

SEQ ID NO: 122 - DNA, 20 bp, Artificial Sequence
  Antisense Oligonucleotide
tggcaatgtaggagtctttc

SEQ ID NO: 123 - DNA, 20 bp, Artificial Sequence
  Antisense Oligonucleotide
ccatcagatggccagtactg

SEQ ID NO: 124 - DNA, 20 bp, Artificial Sequence
  Antisense Oligonucleotide
atactgttccagtgtctgga

SEQ ID NO: 125 - DNA, 20 bp, Artificial Sequence
  Antisense Oligonucleotide
gtcacctgtcacttgaagtt

SEQ ID NO: 126 - DNA, 20 bp, Artificial Sequence
  Antisense Oligonucleotide
aagatatatacaattttggg

SEQ ID NO: 127 - DNA, 20 bp, Artificial Sequence
  Antisense Oligonucleotide
tgccatttctaaaacagtta

SEQ ID NO: 128 - DNA, 20 bp, Artificial Sequence
  Antisense Oligonucleotide
aacaggtaatagaagcctat

SEQ ID NO: 129 - DNA, 20 bp, Artificial Sequence
  Antisense Oligonucleotide
aggactatcagtgctaacac

SEQ ID NO: 130 - DNA, 20 bp, Artificial Sequence
  Antisense Oligonucleotide
gcaaggaacaatctggccca

SEQ ID NO: 131 - DNA, 20 bp, Artificial Sequence
  Antisense Oligonucleotide
tcttctttaggaaaagatat

SEQ ID NO: 132 - DNA, 20 bp, Artificial Sequence
  Antisense Oligonucleotide
aatgagtcttaggtttatct

SEQ ID NO: 133 - DNA, 20 bp, Artificial Sequence
  Antisense Oligonucleotide
ttttagttggcactgagcta

SEQ ID NO: 134 - DNA, 20 bp, Artificial Sequence
  Antisense Oligonucleotide
cctcaagagctctgagaact

SEQ ID NO: 135 - DNA, 20 bp, Artificial Sequence
  Antisense Oligonucleotide
accatttcctcaagagctct

SEQ ID NO: 136 - DNA, 20 bp, Artificial Sequence
  Antisense Oligonucleotide
tgcctgaggtggctgatctt

SEQ ID NO: 137 - DNA, 20 bp, Artificial Sequence
  Antisense Oligonucleotide
ctgacgatccctgctgtggt

SEQ ID NO: 138 - DNA, 20 bp, Artificial Sequence
  Antisense Oligonucleotide
aagagtgtttattacctgac

SEQ ID NO: 139 - DNA, 20 bp, Artificial Sequence
  Antisense Oligonucleotide
atgcccccgcgagtccctgt

SEQ ID NO: 140 - DNA, 20 bp, Artificial Sequence
  Antisense Oligonucleotide
gaagcggcagagagaggact

SEQ ID NO: 141 - DNA, 20 bp, Artificial Sequence
  Antisense Oligonucleotide
agagtggtcatctgcaaaca

SEQ ID NO: 142 - DNA, 20 bp, Artificial Sequence
  Antisense Oligonucleotide
cacatttacactacaatgaa

SEQ ID NO: 143 - DNA, 20 bp, Artificial Sequence
  Antisense Oligonucleotide
tacacctgcactgtagccag

SEQ ID NO: 144 - DNA, 20 bp, Artificial Sequence
  Antisense Oligonucleotide
tgaagttaatttctgaatga

SEQ ID NO: 145 - DNA, 20 bp, Artificial Sequence
  Antisense Oligonucleotide
ttgaactcacctggcctctc

SEQ ID NO: 146 - DNA, 20 bp, Artificial Sequence
  Antisense Oligonucleotide
ctcaccctggtgttggtgac

SEQ ID NO: 147 - DNA, 20 bp, Artificial Sequence
  Antisense Oligonucleotide
tcttgttctcctttggaaga

SEQ ID NO: 148 - DNA, 20 bp, Artificial Sequence
  Antisense Oligonucleotide
ataagactgctctgcccaag

SEQ ID NO: 149 - DNA, 20 bp, Artificial Sequence
  Antisense Oligonucleotide
taggaacaacccaggagagc

SEQ ID NO: 150 - DNA, 20 bp, Artificial Sequence
  Antisense Oligonucleotide
tagagtgttcttagggcagg

SEQ ID NO: 151 - DNA, 20 bp, H. sapiens
ttctctttctgtggcaccaa

SEQ ID NO: 152 - DNA, 20 bp, H. sapiens
tgtggcaccaacattcagcc

SEQ ID NO: 153 - DNA, 20 bp, H. sapiens
attgcggtgatggtggccct

SEQ ID NO: 154 - DNA, 20 bp, H. sapiens
gccctgtcctctctgctagt

SEQ ID NO: 155 - DNA, 20 bp, H. sapiens
tgtacatgttaaggtttaag

SEQ ID NO: 156 - DNA, 20 bp, H. sapiens
gtcctatccaggccacctgt

SEQ ID NO: 157 - DNA, 20 bp, H. sapiens
atccaggccacctgtgaggc

SEQ ID NO: 158 - DNA, 20 bp, H. sapiens
ccagattctgattacatcaa

SEQ ID NO: 159 - DNA, 20 bp, H. sapiens
ctggtggactacacagtacg

SEQ ID NO: 160 - DNA, 20 bp, H. sapiens
ttctgcatccagcaggtggg

SEQ ID NO: 161 - DNA, 20 bp, H. sapiens
gcgcctcatcactcagttcc

SEQ ID NO: 162 - DNA, 20 bp, H. sapiens
cctcaagaaggtgaaggcct

SEQ ID NO: 163 - DNA, 20 bp, H. sapiens
gcccttctggagcattatct

SEQ ID NO: 164 - DNA, 20 bp, H. sapiens
atccagaatgacaagatgcg

SEQ ID NO: 165 - DNA, 20 bp, H. sapiens
aacagagtgatcattccagt

SEQ ID NO: 166 - DNA, 20 bp, H. sapiens
agccagggccctcttctcca

SEQ ID NO: 167 - DNA, 20 bp, H. sapiens
gcgaatgatctgggagtgga

SEQ ID NO: 168 - DNA, 20 bp, H. sapiens
gaggccaggagaagtgtgcc

SEQ ID NO: 169 - DNA, 20 bp, H. sapiens
caggagaagtgtgcccagta

SEQ ID NO: 170 - DNA, 20 bp, H. sapiens
gtgcccagtactggccatct

SEQ ID NO: 171 - DNA, 20 bp, H. sapiens
ctgaagaaggaggaggaatg

SEQ ID NO: 172 - DNA, 20 bp, H. sapiens
tccgagacctcctggtcacc

SEQ ID NO: 173 - DNA, 20 bp, H. sapiens
gacctcctggtcaccaacac

SEQ ID NO: 174 - DNA, 20 bp, H. sapiens
gtcaccaacaccagggagaa

SEQ ID NO: 175 - DNA, 20 bp, H. sapiens
atccggcagttccacttcca

SEQ ID NO: 176 - DNA, 20 bp, H. sapiens
actgtcaagagcctgcggct

SEQ ID NO: 177 - DNA, 20 bp, H. sapiens
agattatgccaacttcaagt

SEQ ID NO: 178 - DNA, 20 bp, H. sapiens
atcttataactgttttagaa

SEQ ID NO: 179 - DNA, 20 bp, H. sapiens
cacaaagttctcagagctct

SEQ ID NO: 180 - DNA, 20 bp, H. sapiens
agctaacaagcatggattcc

SEQ ID NO: 181 - DNA, 20 bp, H. sapiens
tgttctgctcggcagtggtc

SEQ ID NO: 182 - DNA, 20 bp, H. sapiens
ggaattccagcaccgcagca

SEQ ID NO: 183 - DNA, 20 bp, H. sapiens
caggtgtagggcgtacaggt

SEQ ID NO: 184 - DNA, 20 bp, H. sapiens
acttcaagtaagcggcaaca

SEQ ID NO: 185 - DNA, 20 bp, H. sapiens
aaatcctcagccgagaaatt

SEQ ID NO: 186 - DNA, 20 bp, H. sapiens
gcccgactctgtgagtgttc

SEQ ID NO: 187 - DNA, 20 bp, H. sapiens
tttgttgcaggtgacacaac

SEQ ID NO: 188 - DNA, 20 bp, H. sapiens
aaagaagctagtaagtactg

SEQ ID NO: 189 - DNA, 20 bp, H. sapiens
ggtgttctaggacttcttca

SEQ ID NO: 190 - DNA, 20 bp, H. sapiens
tattttccagataagcatgg

SEQ ID NO: 191 - DNA, 20 bp, H. sapiens
acatgttaaggtgagcctac

SEQ ID NO: 192 - DNA, 20 bp, H. sapiens
cagggtgtgcatgacctgtc

SEQ ID NO: 193 - DNA, 20 bp, H. sapiens
ttctcattaggtttaagaaa

SEQ ID NO: 194 - DNA, 20 bp, H. sapiens
gaggatgtgggtaaggcatt

SEQ ID NO: 195 - DNA, 20 bp, H. sapiens
aggagttcgaaaccagcctg

SEQ ID NO: 196 - DNA, 20 bp, H. sapiens
gaaaagaaatttggctttaa

SEQ ID NO: 197 - DNA, 20 bp, H. sapiens
gaagcactttggggctgggc

SEQ ID NO: 198 - DNA, 20 bp, H. sapiens
cctccttcagatgagacacc

SEQ ID NO: 199 - DNA, 20 bp, H. sapiens
cccaccactgatatcatggg

SEQ ID NO: 200 - DNA, 20 bp, H. sapiens
gcactgaggatgtggagccc

SEQ ID NO: 201 - DNA, 20 bp, M. musculus
tcggtcagcatggattcctg

SEQ ID NO: 202 - DNA, 20 bp, M. musculus
gcagcaaccactccagaaac

SEQ ID NO: 203 - DNA, 20 bp, M. musculus
ggtgatggtggccctgtcct

SEQ ID NO: 204 - DNA, 20 bp, M. musculus
agaaatacaagcaagctggg

SEQ ID NO: 205 - DNA, 20 bp, M. musculus
gtggacaagctggaagagga

SEQ ID NO: 206 - DNA, 20 bp, M. musculus
acgctctccctgcttgtcct

SEQ ID NO: 207 - DNA, 20 bp, M. musculus
aggctgctggacctatggga

SEQ ID NO: 208 - DNA, 20 bp, M. musculus
catccagcaggtgggcgacg

SEQ ID NO: 209 - DNA, 20 bp, M. musculus
gtgaaggcctgtaaccctca

SEQ ID NO: 210 - DNA, 20 bp, M. musculus
gatgcattcggaacgcaaag

SEQ ID NO: 211 - DNA, 20 bp, M. musculus
gaaagactcctacattgcca

SEQ ID NO: 212 - DNA, 20 bp, M. musculus
aacttcaagtgacaggtgac

SEQ ID NO: 213 - DNA, 20 bp, M. musculus
taactgttttagaaatggca

SEQ ID NO: 214 - DNA, 20 bp, M. musculus
ataggcttctattacctgtt

SEQ ID NO: 215 - DNA, 20 bp, M. musculus
gtgttagcactgatagtcct

SEQ ID NO: 216 - DNA, 20 bp, M. musculus
tgggccagattgttccttgc

SEQ ID NO: 217 - DNA, 20 bp, M. musculus
agttctcagagctcttgagg

SEQ ID NO: 218 - DNA, 20 bp, M. musculus
agagctcttgaggaaatggt

SEQ ID NO: 219 - DNA, 20 bp, M. musculus
aagatcagccacctcaggca

SEQ ID NO: 220 - DNA, 20 bp, M. musculus
accacagcagggatcgtcag

SEQ ID NO: 221 - DNA, 20 bp, M. musculus
acagggactcgcgggggcat

SEQ ID NO: 222 - DNA, 20 bp, M. musculus
gagaggccaggtgagttcaa

SEQ ID NO: 223 - DNA, 20 bp, M. musculus
cttgggcagagcagtcttat

SEQ ID NO: 224 - DNA, 20 bp, M. musculus
gctctcctgggttgttccta

SEQ ID NO: 225 - DNA, 3643 bp, Homo sapiens
  CDS (687)...(3095)
ggagtatgagtcacgctcaggggagcaggtaccccttctcctaaagatgaagaggagcaaactggcactaagcaaggccatcgagagcggggacactgacctggtgttcacggtgttgctgcacctgaagaacgagctgaaccgaggagattttttcatgacccttcggaatcagcccatggccctcagtttgtaccgacagttctgtaagcatcaggagctagagacgctgaaggacctttacaatcaggatgacaatcaccaggaattgggcagcttccacatccgagccagctatgctgcagaagagcgtattgaggggcgagtagcagctctgcagacagccgccgatgccttctacaaggccaagaatgagtttgcagccaaggctacagaggatcaaatgcggctcctacggctgcagcggcgcctagaagacgagctggggggccagttcctagacctgtctctacatgacacagttaccaccctcattcttggcggtcacaacaagcgtgcagagcagctggcacgtgacttccgcatccctgacaagaggtgacacaactaaaaaaaaacaaaggtatttatggaattccactgagtggtaatggatgatgcagttcaaataactaaggacacatgttcaaagagcataattaactttttaaaagaagctaataagcatggattcctggttcattcttgttctgctcggcagtggtctgatatgtgtcagtgccaacaatgctaccacagttgcaccttctgtaggaattacaagattaattaactcatcaacggcagaaccagttaaagaagaggccaaaacttcaaatccaacttcttcactaacttctctttctgtggcaccaacattcagcccaaatataactctgggacccacctatttaaccactgtcaattcttcagactctgacaatgggaccacaagaacagcaagcaccaattctataggcattacaatttcaccaaatggaacgtggcttccagataaccagttcacggatgccagaacagaaccctgggaggggaattccagcaccgcagcaaccactccagaaactttccctccttcaggtaattctgactcgaaggacagaagagatgagacaccaattattgcggtgatggtggccctgtcctctctgctagtgatcgtgtttattatcatagttttgtacatgttaaggtttaagaaatacaagcaagctgggagccattccaattctttccgcttatccaacggccgcactgaggatgtggagccccagagtgtgccacttctggccagatccccaagcaccaacaggaaatacccacccctgcccgtggacaagctggaagaggaaattaaccggagaatggcagacgacaataagctcttcagggaggaattcaacgctctccctgcatgtcctatccaggccacctgtgaggctgcttccaaggaggaaaacaaggaaaaaaatcgatatgtaaacatcttgccttatgaccactctagagtccacctgacaccggttgaaggggttccagattctgattacatcaatgcttcattcatcaacggttaccaagaaaagaacaaattcattgctgcacaaggaccaaaagaagaaacggtgaatgatttctggcggatgatctgggaacaaaacacagccaccatcgtcatggttaccaacctgaaggagagaaaggagtgcaagtgcgcccagtactggccagaccaaggctgctggacctatgggaatattcgggtgtctgtagaggatgtgactgtcctggtggactacacagtacggaagttctgcatccagcaggtgggcgacatgaccaacagaaagccacagcgcctcatcactcagttccactttaccagctggccagactttggggtgccttttaccccgatcggcatgctcaagttcctcaagaaggtgaaggcctgtaaccctcagtatgcaggggccatcgtggtccactgcagtgcaggtgtagggcgtacaggtacctttgtcgtcattgatgccatgctggacatgatgcatacagaacggaaggtggacgtgtatggctttgtgagccggatccgggcacagcgctgccagatggtgcaaaccgatatgcagtatgtcttcatataccaagcccttctggagcattatctctatggagatacagaactggaagtgacctctctagaaacccacctgcagaaaatttacaacaaaatcccagggaccagcaacaatggattagaggaggagtttaagaagttaacatcaatcaaaatccagaatgacaagatgcggactggaaaccttccagccaacatgaagaagaaccgtgttttacagatcattccatatgaattcaacagagtgatcattccagttaagcggggcgaagagaatacagactatgtgaacgcatcctttattgatggctaccggcagaaggactcctatatcgccagccagggccctcttctccacacaattgaggacttctggcgaatgatctgggagtggaaatcctgctctatcgtgatgctaacagaactggaggagagaggccaggagaagtgtgcccagtactggccatctgatggactggtgtcctatggagatattacagtggaactgaagaaggaggaggaatgtgagagctacaccgtccgagacctcctggtcaccaacaccagggagaataagagccggcagatccggcagttccacttccatggctggcctgaagtgggcatccccagtgacggaaagggcatgatcagcatcatcgccgccgtgcagaagcagcagcagcagtcagggaaccaccccatcaccgtgcactgcagcgccggggcaggaaggacggggaccttctgtgccctgagcaccgtcctggagcgtgtgaaagcagaggggattttggatgtcttccagactgtcaagagcctgcggctacagaggccacacatggtccagacactggaacagtatgagttctgctacaaggtggtgcaggagtatattgatgcattctcagattatgccaacttcaagtaagcggcaacaagggtccgtggaccaggaggattgcctttaatattttgtaatattctgttttgttaatataccccaaattgtgtatatatcttataactgttttagaaattggtacataggcttctattacctattaggtggaaattttatatgtaaatgtgttagcactgatagtcctttttccaatgttttattggggaattaaatagtgtgatgtttggattgatatcgtgaaatcctcagccgagaaattgggctggattgtgctttggttaatacatctttccctaaagaagataaacacaaaatccattccaggtagctcggcaccaactaagaaaaaaagcacaaagttctcagagctctcgaggaaagtggttgtccccgtaccaccatgcactgtaaatatccctcccctctctccctggtcccctcccccatccccaccactgatatcatggggagtaataggaccagagcggtatctctggcaccacactagggactatcaggtaataaaagctttgactccctgaaaaaaaaaaaaa

SEQ ID NO: 226 - DNA, 3279 bp, Homo sapiens
  CDS (350)...(2731)
gcgctcggaccccggccgctgccgccatcactgtcgcccgcccagtcgcccctcagccgcttcccctcgccatggaggcgaggccgccgccgccgccgcggggctcggagccgcgggccgggcggcggccctgagggctagtggcggcccgaaacgccgccgcggagccgaggcggagccgctgtcctcgtccccagcggtcccgcccaacgcccgactctgtgacacaactaaaaaaaaacaaaggtatttatggaattccactgagtggtaatggatgatgcagttcaaataactaaggacacatgttcaaagagcataattaactttttaaaagaagctaataagcatggattcctggttcattcttgttctgctcggcagtggtctgatatgtgtcagtgccaacaatgctaccacagttgcaccttctgtaggaattacaagattaattaactcatcaacggcagaaccagttaaagaagaggccaaaacttcaaatccaacttcttcactaacttctctttctgtggcaccaacattcagcccaaatataactctgggacccacctatttaaccactgtcaattcttcagactctgacaatgggaccacaagaacagcaagcaccaattctataggcattacaatttcaccaaatggaacgtggcttccagataaccagttcacggatgccagaacagaaccctgggaggggaattccagcaccgcagcaaccactccagaaactttccctccttcagatgagacaccaattattgcggtgatggtggccctgtcctctctgctagtgatcgtgtttattatcatagttttgtacatgttaaggtttaagaaatacaagcaagctgggagccattccaattctttccgcttatccaacggccgcactgaggatgtggagccccagagtgtgccacttctggccagatccccaagcaccaacaggaaatacccacccctgcccgtggacaagctggaagaggaaattaaccggagaatggcagacgacaataagctcttcagggaggaattcaacgctctccctgcatgtcctatccaggccacctgtgaggctgcttccaaggaggaaaacaaggaaaaaaatcgatatgtaaacatcttgccttatgaccactctagagtccacctgacaccggttgaaggggttccagattctgattacatcaatgcttcattcatcaacggttaccaagaaaagaacaaattcattgctgcacaaggaccaaaagaagaaacggtgaatgatttctggcggatgatctgggaacaaaacacagccaccatcgtcatggttaccaacctgaaggagagaaaggagtgcaagtgcgcccagtactggccagaccaaggctgctggacctatgggaatattcgggtgtctgtagaggatgtgactgtcctggtggactacacagtacggaagttctgcatccagcaggtgggcgacatgaccaacagaaagccacagcgcctcatcactcagttccactttaccagctggccagactttggggtgccttttaccccgatcggcatgctcaagttcctcaagaaggtgaaggcctgtaaccctcagtatgcaggggccatcgtggtccactgcagtgcaggtgtagggcgtacaggtacctttgtcgtcattgatgccatgctggacatgatgcatacagaacggaaggtggacgtgtatggctttgtgagccggatccgggcacagcgctgccagatggtgcaaaccgatatgcagtatgtcttcatataccaagcccttctggagcattatctctatggagatacagaactggaagtgacctctctagaaacccacctgcagaaaatttacaacaaaatcccagggaccagcaacaatggattagaggaggagtttaagaagttaacatcaatcaaaatccagaatgacaagatgcggactggaaaccttccagccaacatgaagaagaaccgtgttttacagatcattccatatgaattcaacagagtgatcattccagttaagcggggcgaagagaatacagactatgtgaacgcatcctttattgatggctaccggcagaaggactcctatatcgccagccagggccctcttctccacacaattgaggacttctggcgaatgatctgggagtggaaatcctgctctatcgtgatgctaacagaactggaggagagaggccaggagaagtgtgcccagtactggccatctgatggactggtgtcctatggagatattacagtggaactgaagaaggaggaggaatgtgagagctacaccgtccgagacctcctggtcaccaacaccagggagaataagagccggcagatccggcagttccacttccatggctggcctgaagtgggcatccccagtgacggaaagggcatgatcagcatcatcgccgccgtgcagaagcagcagcagcagtcagggaaccaccccatcaccgtgcactgcagcgccggggcaggaaggacggggaccttctgtgccctgagcaccgtcctggagcgtgtgaaagcagaggggattttggatgtcttccagactgtcaagagcctgcggctacagaggccacacatggtccagacactggaacagtatgagttctgctacaaggtggtgcaggagtatattgatgcattctcagattatgccaacttcaagtaagcggcaacaagggtccgtggaccaggaggattgcctttaatattttgtaatattctgttttgttaatataccccaaattgtgtatatatcttataactgttttagaaattggtacataggcttctattacctattaggtggaaattttatatgtaaatgtgttagcactgatagtcctttttccaatgttttattggggaattaaatagtgtgatgtttggattgatatcgtgaaatcctcagccgagaaattgggctggattgtgctttggttaatacatctttccctaaagaagataaacacaaaatccattccaggtagctcggcaccaactaagaaaaaaagcacaaagttctcagagctctcgaggaaagtggttgtccccgtaccaccatgcactgtaaatatccctcccctctctccctggtcccctcccccatccccaccactgatatcatggggagtaataggaccagagcggtatctctggcaccacactagggactatcaggtaataaaagctttgactccctgaaaaaaaaaaaaa

SEQ ID NO: 227 - DNA, 2430 bp, Homo sapiens
  CDS (31)...(2412)
taattaactttttaaaagaagctaataagcatggattcctggttcattcttgttctgctcggcagtggtctgatatgtgtcagtgccaacaatgctaccacagttgcaccttctgtaggaattacaagattaattaactcatcaacggcagaaccagttaaagaagaggccaaaacttcaaatccaacttcttcactaacttctctttctgtggcaccaacattcagcccaaatataactctgggacccacctatttaaccactgtcaattcttcagactctgacaatgggaccacaagaacagcaagcaccaattctataggcattacaatttcaccaaatggaacgtggcttccagataaccagttcacggatgccagaacagaaccctgggaggggaattccagcaccgcagcaaccactccagaaactttccctccttcagatgagacaccaattattgcggtgatggtggccctgtcctctctgctagtgatcgtgtttattatcatagttttgtacatgttaaggtttaagaaatacaagcaagctgggagccattccaattctttccgcttatccaacggccgcactgaggatgtggagccccagagtgtgccacttctggccagatccccaagcaccaacaggaaatacccacccctgcccgtggacaagctggaagaggaaattaaccggagaatggcagacgacaataagctcttcagggaggaattcaacgctctccctgcatgtcctatccaggccacctgtgaggctgcttccaaggaggaaaacaaggaaaaaaatcgatatgtaaacatcttgccttatgaccactctagagtccacctgacaccggttgaaggggttccagattctgattacatcaatgcttcattcatcaacggttaccaagaaaagaacaaattcattgctgcacaaggaccaaaagaagaaacggtgaatgatttctggcggatgatctgggaacaaaacacagccaccatcgtcatggttaccaacctgaaggagagaaaggagtgcaagtgcgcccagtactggccagaccaaggctgctggacctatgggaatattcgggtgtctgtagaggatgtgactgtcctggtggactacacagtacggaagttctgcatccagcaggtgggcgacatgaccaacagaaagccacagcgcctcatcactcagttccactttaccagctggccagactttggggtgccttttaccccgatcggcatgctcaagttcctcaagaaggtgaaggcctgtaaccctcagtatgcaggggccatcgtggtccactgcagtgcaggtgtagggcgtacaggtacctttgtcgtcattgatgccatgctggacatgatgcatacagaacggaaggtggacgtgtatggctttgtgagccggatccgggcacagcgctgccagatggtgcaaaccgatatgcagtatgtcttcatataccaagcccttctggagcattatctctatggagatacagaactggaagtgacctctctagaaacccacctgcagaaaatttacaacaaaatcccagggaccagcaacaatggattagaggaggagtttaagaagttaacatcaatcaaaatccagaatgacaagatgcggactggaaaccttccagccaacatgaagaagaaccgtgttttacagatcattccatatgaattcaacagagtgatcattccagttaagcggggcgaagagaatacagactatgtgaacgcatcctttattgatggctaccggcagaaggactcctatatcgccagccagggccctcttctccacacaattgaggacttctggcgaatgatctgggagtggaaatcctgctctatcgtgatgctaacagaactggaggagagaggccaggagaagtgtgcccagtactggccatctgatggactggtgtcctatggagatattacagtggaactgaagaaggaggaggaatgtgagagctacaccgtccgagacctcctggtcaccaacaccagggagaataagagccggcagatccggcagttccacttccatggctggcctgaagtgggcatccccagtgacggaaagggcatgatcagcatcatcgccgccgtgcagaagcagcagcagcagtcagggaaccaccccatcaccgtgcactgcagcgccggggcaggaaggacggggaccttctgtgccctgagcaccgtcctggagcgtgtgaaagcagaggggattttggatgtcttccagactgtcaagagcctgcggctacagaggccacacatggtccagacactggaacagtatgagttctgctacaaggtggtgcaggagtatattgatgcattctcagattatgccaacttcaagtaagcggcaacaagggtccgt
